(19) United States
(12) Patent Application Publication
(10) Pub. No.: US 2025/0066781 A1
(43) Pub. Date: Feb. 27, 2025

(54) METHODS FOR TREATING CONDITIONS AND DISEASES

(71) Applicant: Stoke Therapeutics, Inc., Bedford, MA (US)

(72) Inventors: Baruch Ticho, Newton, MA (US); Kimberly Parkerson, Phoenix, AZ (US); Meena Meena, Belmont, MA (US); Susovan Mohapatra, Acton, MA (US)

(21) Appl. No.: 18/782,724

(22) Filed: Jul. 24, 2024

Related U.S. Application Data
(60) Provisional application No. 63/515,284, filed on Jul. 24, 2023.

(51) Int. Cl. C12N 15/113; A61P 25/08

(52) U.S. Cl. CPC C12N 15/113; A61P 25/08; C12N 2310/11

(57) ABSTRACT

Provided herein are methods for treating conditions and diseases characterized by SCN1A, SCN8A or SCN5A protein deficiency by targeting the alternative splicing events in SCN1A gene and modulating the expression level of functional proteins in Dravet Syndrome patients and/or inhibit aberrant protein expression.

### CROSS REFERENCE

[0001] This application claims benefit of U.S. Provisional Patent Application No. 63/515,284 filed Jul. 24, 2023, which is incorporated herein by reference in its entirety.

### SEQUENCE LISTING

[0002] The instant application contains a Sequence Listing which has been submitted electronically in XML format and is hereby incorporated by reference in its entirety. Said XML copy, created on Sep. 24, 2024, is named 47991-747_201_SL.xml and is 1,678,951 bytes in size.

### BACKGROUND

[0003] Nervous system disorders are often associated with channelopathy, characterized by the disturbed function of ion channels that mediate neuronal excitability, neuronal interactions, and brain functions at large. Mutations in the SCN1A gene, which is part of the SCN1A-SCN2A-SCN3A gene cluster that encodes alpha-pore forming subunits of the neuronal voltage-gated sodium channel, can result in expression of Na_{V}1.1 protein (also termed as “Na_{V}1.1”) with reduced functions as compared to a wild-type Na_{V}1.1 protein, reduced expression of Na_{V}1.1, or both. Mutations in SCN1A gene are associated with development of disease number of diseases and conditions, such as Dravet Syndrome (DS) (Miller, et al., 1993-2015, GeneReviews, Eds. Pagon R A, et al., Seattle (WA): University of Washington, Seattle, Bookshelf ID: NBK1318, and Mulley, et al., 2005, Hum. Mutat. 25:535-542).

### SUMMARY OF THE DISCLOSURE

[0004] Provided herein, in some aspects, is a compound according to the following chemical structure (SEQ ID NO: 1100):

[chemical structure]

or a salt thereof.

[0005] In some cases, the compound has the following chemical structure (SEQ ID NO: 1100):

[chemical structure]

[0006] Provided herein, in some aspects, is a method of treating or reducing the likelihood of developing a disease or condition characterized by a reduced expression or function of Na_{V}1.1 protein in a human subject in need thereof, the method comprising administering to the human subject a pharmaceutical composition comprising a compound according to chemical structure (I) as aforementioned, or a salt thereof, thereby treating or reducing the likelihood of developing the disease or condition in the human subject. In some cases, the compound has chemical structure (II) as aforementioned.

[0007] Provided herein, in some aspects, is a pharmaceutical formulation comprising: (a) a compound according to chemical structure (I) as aforementioned, or a salt thereof; and (b) a pharmaceutically acceptable diluent, and wherein the compound is dissolved or suspended in a solution. In some cases, the compound has chemical structure (II) as aforementioned.

[0008] Provided herein, in some aspects, is a kit comprising: (i) a concentrate comprising a compound according to chemical structure (I) as aforementioned, or a salt thereof; and (ii) a diluent, wherein the concentrate is miscible with the diluent; and (iii) instructions for diluting or solubilizing the compound in the diluent. In some cases, the compound has chemical structure (II) as aforementioned.

[0009] Provided herein, in some aspects, is a use of a compound for the manufacture of a medicament for treating or preventing a disease or condition characterized by a reduced expression or function of Na_{V}1.1 protein in a human subject in need thereof, and wherein the compound is according to chemical structure (I) as aforementioned, or a salt thereof. In some cases, the compound has chemical structure (II) as aforementioned.

[0010] Provided herein, in some aspects, is a method of treating or reducing the likelihood of developing a disease or condition in a human subject in need thereof, the method comprising administering to the human subject the pharmaceutical composition comprising the compound disclosed herein at a first dose amount of from about 30 to about 70 mg and one or more maintenance doses, wherein the one or more maintenance doses contain a dose amount that is different from the first dose amount. In some cases, the compound is according to the chemical structure (I) as aforementioned, or a salt thereof. In some cases, the compound is according to the chemical structure (II) as aforementioned.

[0011] In some embodiments, the method comprises administering to the human subject the pharmaceutical composition comprising the compound at the first dose of about 20, 22.5, 25, 27.5, 30, 32.5, 35, 37.5, 40, 42.5, 45, 47.5, 50, 52.5, 55, 57.5, 60, 62.5, 65, 67.5, 70, 72.5, 75, 77.5, or 80 mg. In some embodiments, the first dose contains the compound at a dose amount of about 30 mg. In some embodiments, the first dose contains the compound at a dose amount of about 70 mg. In some embodiments, the first dose contains the compound at a dose amount of about 45 mg. In some embodiments, the first dose contains the compound at a dose amount of about 50 mg. In some embodiments, the first dose contains the compound at a dose amount of from 25 mg to about 35 mg. In some embodiments, the first dose contains the compound at a dose amount of from 35 to 50 mg. In some embodiments, the first dose contains the compound at a dose amount of from 45 to 70 mg. In some embodiments, the first dose contains the compound at a dose amount of from 50 to 70 mg. In some embodiments, the first dose contains the compound at a dose amount of from 60 to 80 mg. In some embodiments, the first dose contains the compound at a dose amount of from 30 to 45 mg. In some embodiments, the first dose contains the compound at a dose amount of from 25 to 40 mg. In some embodiments, the first dose contains the compound at a dose amount of from 35 to 45 mg. In some embodiments, the first dose contains the compound at a dose amount of from 40 to 55 mg.

[0012] In some embodiments, the one or more maintenance doses contain a dose of from about 0.5 milligrams to about 500 milligrams. In some embodiments, the one or more maintenance doses is about 0.1, 0.5, 1, 2.5, 5, 6, 7, 8, 9, 10, 11, 12, 13, 14, 15, 16, 17, 18, 19, 20, 22.5, 25, 27.5, 30, 32.5, 35, 37.5, 40, 42.5, 45, 47.5, 50, 52.5, 55, 57.5, 60, 62.5, 65, 67.5, 70, 72.5, 75, 77.5, 80, 82.5, 85, 87.5, 90, 92.5, 95, 97.5, 100, 102.5, 105, 107.5, 110, 112.5, 115, 117.5, 120, 122.5, 125, 127.5, 130, 132.5, 135, 137.5, 140, 142.5, 145, 147.5, 150, 152.5, 155, 157.5, 160, 162.5, 165, 167.5, 170, 172.5, 175, 177.5, 180, 182.5, 185, 187.5, 190, 192.5, 195, 197.5, 200, 202.5, 205, 207.5, 210, 212.5, 215, 217.5, 220, 222.5, 225, 227.5, 230, 232.5, 235, 237.5, 240, 242.5, 245, 247.5, or 250 mg. In some embodiments, the one or more maintenance doses is about 3 mg, 3.5 mg, 4 mg, 4.5 mg, or 5 mg. In some embodiments, the one or more maintenance doses contain the compound at a dose amount of about 10, 15, 20, 25, 30, 35, 40, 45, 50, 60, 70, or 80 mg. In some embodiments, the one or more maintenance doses contain the compound at a dose amount of about 30 mg. In some embodiments, the one or more maintenance doses contain the compound at a dose amount of about 45 mg. In some embodiments, the one or more maintenance doses contain the compound at a dose amount of about 70 mg. In some embodiments, the one or more maintenance doses contain the compound at a dose amount of from 10 to 45 mg. In some embodiments, the one or more maintenance doses contain the compound at a dose amount of from 15 to 45 mg. In some embodiments, the one or more maintenance doses contain the compound at a dose amount of from 20 to 45 mg. In some embodiments, the one or more maintenance doses contain the compound at a dose amount of from 25 to 45 mg. In some embodiments, the one or more maintenance doses contain the compound at a dose amount of from 30 to 45 mg. In some embodiments, the one or more maintenance doses contain the compound at a dose amount of from 35 to 45 mg. In some embodiments, the one or more maintenance doses contain the compound at a dose amount of from 10 to 40 mg. In some embodiments, the one or more maintenance doses contain the compound at a dose amount of from 15 to 40 mg. In some embodiments, the one or more maintenance doses contain the compound at a dose amount of from 20 to 40 mg. In some embodiments, the one or more maintenance doses contain the compound at a dose amount of from 25 to 40 mg. In some embodiments, the one or more maintenance doses contain the compound at a dose amount of from 30 to 40 mg. In some embodiments, the one or more maintenance doses contain the compound at a dose amount of from 10 to 35 mg. In some embodiments, the one or more maintenance doses contain the compound at a dose amount of from 15 to 35 mg. In some embodiments, the one or more maintenance doses contain the compound at a dose amount of from 20 to 35 mg. In some embodiments, the one or more maintenance doses contain the compound at a dose amount of from 25 to 35 mg. In some embodiments, the one or more maintenance doses contain the compound at a dose amount of from 30 to 35 mg. In some embodiments, the one or more maintenance doses contain the compound at a dose amount of from 10 to 30 mg. In some embodiments, the one or more maintenance doses contain the compound at a dose amount of from 15 to 30 mg. In some embodiments, the one or more maintenance doses contain the compound at a dose amount of from 20 to 30 mg. In some embodiments, the one or more maintenance doses contain the compound at a dose amount of from 25 to 30 mg. In some embodiments, the one or more maintenance doses contain the compound at a dose amount of from 10 to 25 mg. In some embodiments, the one or more maintenance doses contain the compound at a dose amount of from 15 to 25 mg. In some embodiments, the one or more maintenance doses contain the compound at a dose amount of from 20 to 25 mg. In some embodiments, the one or more maintenance doses contain the compound at a dose amount of from 10 to 20 mg. In some embodiments, the one or more maintenance doses contain the compound at a dose amount of from 15 to 20 mg. In some embodiments, the one or more maintenance doses contain the compound at a dose amount of from 55 to 70 mg. In some embodiments, the one or more maintenance doses contain the compound at a dose amount of from 55 to 75 mg. In some embodiments, the one or more maintenance doses contain the compound at a dose amount of from 55 to 80 mg. In some embodiments, the one or more maintenance doses contain the compound at a dose amount of from 40 to 70 mg. In some embodiments, the one or more maintenance doses contain the compound at a dose amount of from 40 to 75 mg. In some embodiments, the one or more maintenance doses contain the compound at a dose amount of from 40 to 80 mg. In some embodiments, the one or more maintenance doses contain the compound at a dose amount of from 65 to 90 mg. In some embodiments, the one or more maintenance doses contain the compound at a dose amount of from 65 to 95 mg. In some embodiments, the one or more maintenance doses contain the compound at a dose amount of from 65 to 100 mg.

[0013] In some embodiments, the one or more maintenance doses is higher than the first dose. In some embodiments, the one or more maintenance doses contain the compound at a dose amount that is at least about 10%, 20%, 30%, 40%, 50%, 60%, 70%, or 80% higher than the first dose amount. In some embodiments, the one or more maintenance doses contain the compound at a dose amount that is at least about 5 mg, 10 mg, 15 mg, 20 mg, 30 mg, 50 mg, or 70 mg higher than the first dose amount. In some embodiments, the one or more maintenance doses is higher than the first dose following an indication that administration of the first dose is tolerated. In some embodiments, the one or more maintenance doses is higher than the first dose following an indication that administration of the first dose is not effective. In some embodiments, the one or more maintenance doses is lower than the first dose. In some embodiments, the one or more maintenance doses contain the compound at a dose amount that is at least about 10%, 20%, 30%, 40%, 50%, 60%, 70%, or 80% lower than the first dose amount. In some embodiments, the one or more maintenance doses contain the compound at a dose amount that is at least about 5 mg, 10 mg, 15 mg, 20 mg, 30 mg, 35 mg, 40 mg, or 45 mg lower than the first dose amount.

[0014] In some embodiments, the one or more maintenance doses is higher than the first dose following an indication that administration of the first dose is not tolerated. In some embodiments, the one or more maintenance doses is lower than the first dose following an indication that administration of the first dose is not effective. In some embodiments, a subsequent dose of the one or more maintenance doses is higher than a previously administered maintenance dose. In some embodiments, a subsequent dose of the one or more maintenance doses is the same as a previously administered maintenance dose. In some embodiments, a subsequent dose of the one or more maintenance doses is lower than a previously administered maintenance dose.

[0015] In some embodiments, the first of the one or more maintenance doses are administered at least 1, 2, 3, 4, 5, 6, 7, 8, 9, 10, 11, or 12 weeks after administration of the first dose. In some embodiments, the first of the one or more maintenance doses is administered at least 1, 2, 3, 4, 5, 6, 7, 8, 9, 10, 11, or 12 months after administration of the first dose. In some embodiments, the one or more maintenance doses is administered 4 weeks after the administration of the first dose. In some embodiments, the one or more maintenance doses is administered 8 weeks after the administration of the first dose. In some embodiments, the first of the one or more maintenance doses are administered at least 1, 2, 3, 4, 5, 6, 7, or 8 weeks after administration of a previous maintenance dose. In some embodiments, a subsequent dose of the one or more maintenance doses is administered at least 1, 2, 3, 4, 5, 6, 7, 8, 9, 10, 11, or 12 months after administration of a previous maintenance dose. In some embodiments, a subsequent dose of the one or more maintenance doses is administered 4 weeks after the administration of a previously administered maintenance dose. In some embodiments, the dose frequency is maintained or reduced following an indication that the previous dose is effective or not tolerated. In some embodiments, the dose frequency is increased following an indication that the previous dose is not effective or tolerated. In some embodiments, the dose frequency is maintained or reduced following an indication that the previous dose is effective. In some embodiments, the dose frequency is increased following an indication that the previous dose is not effective.

[0016] In some embodiments, the first dose contains the compound at a dose amount effective to reduce seizure frequency and/or improve cognition and/or behavior for over one year, compared to a subject not treated with the compound. In some embodiments, the one or more maintenance doses contains the compound at a dose amount effective to reduce seizure frequency and/or improve cognition and/or behavior for over one year, compared to observed natural history of the disease. In some embodiments, the first dose contains the compound at a dose amount effective to reduce seizure frequency and/or improve cognition and/or behavior for over six months, compared to a subject not treated with the compound. In some embodiments, the one or more maintenance doses contains the compound at a dose amount effective to reduce seizure frequency and/or improve cognition and/or behavior for over six months, compared to observed natural history of the disease. In some embodiments, the first dose contains the compound at a dose amount effective to reduce seizure frequency and/or improve cognition and/or behavior for over three months, compared to a subject not treated with the compound. In some embodiments, the one or more maintenance doses contain the compound at a dose amount effective to reduce seizure frequency and/or improve cognition and/or behavior for over three months, compared to observed natural history of the disease.

[0017] In some embodiments, the pharmaceutical composition comprises a pharmaceutically acceptable excipient, carrier, or diluent. In some embodiments, the pharmaceutical composition is a liquid composition. In some embodiments, the pharmaceutical composition comprises from 0.1 mL to 50 mL of a diluent, wherein the compound is solubilized or diluted in the diluent. In some embodiments, the pharmaceutical composition comprises about 0.1, 0.5, 1, 2, 2.5, 3, 4, 5, 6, 7, 8, 9, 10, 11, 12, 13, 14, 15, 16, 17, 18, 19, 20, 25, 30, 35, 40, 45 or 50 mL of the diluent. In some embodiments, the pharmaceutical composition comprises 1 mL to 20 mL of the diluent, 2 mL to 10 mL of the diluent or 1 mL to 5 mL of the diluent. In some embodiments, the pharmaceutical composition comprises at least 5, 6, 7, 8, 9, or 10 mL of the diluent. In some embodiments, the pharmaceutical composition comprises about 5, 6, 7, 8, 9, or 10 mL of the diluent. In some embodiments, the pharmaceutical composition comprises about 5 mL of the diluent. In some embodiments, the pharmaceutical composition comprises about 7 mL of the diluent. In some embodiments, the pharmaceutical composition comprises about 9 mL of the diluent. In some embodiments, the pharmaceutical composition comprises about 10 mL of the diluent. In some embodiments, the compound is dissolved or suspended in the diluent and the first dose has a volume of 10 mL or higher. In some embodiments, the compound is dissolved or suspended in the diluent and the first dose has a volume of 5 ml or higher. In some embodiments, the compound is dissolved or suspended in the diluent and the first dose has a volume of 10 mL. In some embodiments, the compound is dissolved or suspended in the diluent and the first dose has a volume of 15 mL. In some embodiments, the compound is dissolved or suspended in the diluent and the first dose has a volume of 20 mL. In some embodiments, the compound is dissolved or suspended in the diluent and the first dose has a volume of 25 mL. In some embodiments, the compound is dissolved or suspended in the diluent and the first dose has a volume of 30 mL. In some embodiments, the compound is dissolved or suspended in the diluent and each of the one or more maintenance doses has a volume of 5 mL or higher. In some embodiments, the compound is dissolved or suspended in the diluent and each of the one or more maintenance doses has a volume of 10 mL or higher. In some embodiments, the compound is dissolved or suspended in the diluent and each of the one or more maintenance doses has a volume of 5 mL. In some embodiments, the compound is dissolved or suspended in the diluent and each of the one or more maintenance doses has a volume of 10 mL. In some embodiments, the compound is dissolved or suspended in the diluent and each of the one or more maintenance doses has a volume of 15 mL. In some embodiments, the compound is dissolved or suspended in the diluent and each of the one or more maintenance doses has a volume of 20 mL. In some embodiments, the compound is dissolved or suspended in the diluent and each of the one or more maintenance doses has a volume of 25 mL. In some embodiments, the compound is dissolved or suspended in the diluent and each of the one or more maintenance doses has a volume of 30 mL. In some embodiments, the diluent comprises a cerebral spinal fluid (CSF) sample from the human subject or an artificial cerebral spinal fluid (aCSF) solution. In some embodiments, the diluent comprises cerebral spinal fluid sample from the human subject.

[0018] In some embodiments, the pharmaceutical composition is administered into the intrathecal space of the human subject. In some embodiments, the pharmaceutical composition is administered into the cerebrospinal fluid of the human subject. In some embodiments, the pharmaceutical composition is administered into the brain of the human subject. In some embodiments, the pharmaceutical composition is administered into the cerebrospinal fluid in the brain of the human subject. In some embodiments, the pharmaceutical composition is administered as a bolus injection. In some embodiments, the method comprises administering the pharmaceutical composition as a bolus injection over 1 to 60 minutes, 1 to 50 minutes, 1 to 40 minutes, 1 to 30 minutes, 1 to 20 minutes, 1 to 10 minutes, 1 to 5 minutes, or 1 to 3 minutes. In some embodiments, the pharmaceutical composition is administered by infusion with a delivery pump. In some embodiments, the pharmaceutical composition is administered by intracerebroventricular injection. In some embodiments, the pharmaceutical composition is administered by intrathecal injection. In some embodiments, the pharmaceutical composition is administered by lumbar injection.

[0019] In some embodiments, the compound is solubilized or diluted in an isotonic solution. In some embodiments, the compound is solubilized or diluted in a phosphate-buffered solution with at least pH 5.8. In some embodiments, the compound is solubilized or diluted in a phosphate-buffered (pH 6.6-7.6) solution. In some embodiments, the compound is solubilized or diluted in a buffer comprising 25-250 mM NaCl. In some embodiments, the compound is solubilized or diluted in a buffer comprising 0.1-20 mM KCl. In some embodiments, the compound is solubilized or diluted in a buffer comprising 0.1-50 mM Na₂HPO₄. In some embodiments, the compound is solubilized or diluted in a buffer comprising 0.1-50 mM NaH₂PO₄. In some embodiments, the compound is solubilized or diluted in a buffer comprising 0.1-50 mM CaCl₂. In some embodiments, the compound is solubilized or diluted in a buffer comprising 0.1-50 mM MgCl₂. In some embodiments, the compound is solubilized or diluted in a buffer comprising 150 mM NaCl, 3.0 mM KCl, 0.7 mM Na₂HPO₄, 0.3 mM NaH₂PO₄, 0.79 mM MgCl₂, and 1.4 mM CaCl₂. In some embodiments, the compound is solubilized or diluted in a buffer further comprising 1-100 mM NaHCO₃, 1-100 mM KHCO₃, or a combination thereof. In some embodiments, the compound is solubilized or diluted in a buffer further comprising carbohydrates. In some embodiments, the carbohydrates comprise D-glucose. In some embodiments, the compound is solubilized or diluted in a buffer further comprising 1-100 mM D-glucose. In some embodiments, the compound is solubilized or diluted in a buffer further comprising an antioxidant. In some embodiments, the antioxidant is t-butylhydroxyquinoline (TBHQ), butylated hydroxytoluene (BHT), butylated hydroxyanisole (BHA), vitamin E, or any combination thereof. In some embodiments, the pharmaceutical formulation does not comprise a preservative.

[0020] In some embodiments, the compound is present in the pharmaceutical composition at a concentration of from 0.1 mg/mL to 100 mg/mL. In some embodiments, the compound is present in the pharmaceutical composition at a concentration of about 0.1 mg/mL, 0.5 mg/mL, 1 mg/mL, 2 mg/mL, 2.5 mg/mL, 3 mg/mL, 4 mg/mL, 5 mg/mL, 6 mg/mL, 7 mg/mL, 8 mg/mL, 9 mg/mL, 10 mg/mL, 11 mg/mL, 12 mg/mL, 13 mg/mL, 14 mg/mL, 15 mg/mL, 16 mg/mL, 17 mg/mL, 18 mg/mL, 19 mg/mL, 20 mg/mL, 22.5 mg/mL, or 25 mg/mL.

[0021] In some embodiments, the human subject is at most 18 years old at first dose. In some embodiments, the human subject is from 1 to 18, from 2 to 18, from 3 to 18, from 4 to 18, from 5 to 18, from 6 to 18, from 7 to 18, from 8 to 18, from 9 to 18, from 10 to 18, from 11 to 18, from 12 to 18, from 13 to 18, from 14 to 18, from 15 to 18, from 16 to 18, or from 17 to 18 years old. In some embodiments, the human subject is a human from 1 to 17, from 1 to 16, from 1 to 15, from 1 to 14, from 1 to 13, from 1 to 12, from 1 to 11, from 1 to 10, from 1 to 9, from 1 to 8, from 1 to 7, from 1 to 6, from 1 to 5, from 1 to 4, from 1 to 3, or from 1 to 2 years old. In some embodiments, the method treats the disease or condition.

[0022] In some embodiments, the disease or condition is Dravet Syndrome. In some embodiments, the human subject is characterized by having: seizure onset prior to 12 months of age with recurrent focal motor or hemiconvulsive or generalized tonic-clonic seizures, which are often prolonged and triggered by hyperthermia; no past history of causal magnetic resonance imaging lesion; no other known etiology of any diseases or conditions except Dravet Syndrome; normal development at seizure onset; a pathogenic variant, or variant of uncertain significance in an SCN1A gene; at least 2 prior treatments for epilepsy that either had lack of adequate seizure control; 4 or more convulsive seizures during the 28 days prior to administering, wherein the convulsive seizures is any one selected from Hemiclonic, Focal with Motor Signs, Focal to Bilateral Tonic Clonic Convulsion, Generalized Tonic Clonic Convulsion, Tonic, Tonic or Atonic (Drop Attacks), and Clonic; a current intervention for epilepsy or medication with at least one antiepileptic drug at a dose which has been stable for at least 4 weeks, wherein the interventions for epilepsy is a ketogenic diet, a vagal nerve stimulator, or a cannabinoid or marijuana-derived product; or any combination of (i)-(viii). In some embodiments, the human subject is additionally characterized by not having one or more of the following: one of the following mutations in the SCN1A gene: Thr226Met, Leu263Val, Val422Leu, Thr1174Ser, Trp1204Arg, Pro1345Ser, Gln1489Lys, Phe1499Leu, Arg1575Cys, Val1611Phe, Leu1624Pro, Arg1648Cys, Leu1649Gln, Leu1670Trp, Gly 1674Arg, and Asp 1866Tyr; a known pathogenic mutation in another gene that causes epilepsy, wherein the pathogenic mutation is homozygous in cases of known recessive disease; currently treated with a sodium channel blocker as maintenance treatment and an anticoagulant, wherein the sodium channel blocker is phenytoin, carbamazepine, oxcarbazepine, lamotrigine, lacosamide, or rufinamide, and wherein the anticoagulant is not an aspirin; clinically, significantly unstable medical conditions other than epilepsy; clinically, relevant symptoms or a clinically significant illness in the 4 weeks prior to administering, other than epilepsy: a history of brain or spinal cord disease other than epilepsy or Dravet Syndrome; or a history of bacterial meningitis or brain malformation; a spinal deformity or other condition that alters the free flow of cerebrospinal fluid (CSF) or having an implanted CSF drainage shunt; clinically significant abnormal laboratory values prior to administering; aspartate aminotransferase or alanine aminotransferase >2.5-fold upper limit of normal, serum creatinine greater than an upper limit of normal or platelet count less than a lower limit of normal; clinically relevant abnormalities in the 12-lead electrocardiogram (ECG) measured at prior to administering; a psychiatric or behavioral disorder; currently or in the past 4 weeks, medication of an anticoagulant, wherein the anticoagulant is not aspirin; or any combination of (a)-(l).

[0023] In some embodiments, the human subject comprises a missense or a nonsense mutation in SCN1A gene. In some embodiments, the method reduces or ameliorates at least one symptom of Dravet Syndrome in the human subject. In some embodiments, the symptom of Dravet Syndrome is a seizure. In some embodiments, the administration reduces or ameliorates seizure frequency, seizure intensity, or seizure duration. In some embodiments, the method further comprises assessing tolerability or effectiveness of the pharmaceutical composition.

[0024] In some embodiments, the method further comprises administrating at least one additional therapeutic agent or therapy. In some embodiments, the at least one additional therapeutic agent or therapy is administered at the same time as the first dose. In some embodiments, the at least one additional therapeutic agent or therapy is administered at the same time as the one or more maintenance doses. In some embodiments, the at least one additional therapeutic agent or therapy is administered prior to administration of the first dose. In some embodiments, the at least one additional therapeutic agent or therapy is administered after administration of the first dose. In some embodiments, the at least one additional therapeutic agent or therapy comprises fenfluramine.

[0025] In some embodiments, the compound reduces expression or function of Na_{V}1.1 protein that is associated with an altered splicing of a nonsense-mediated RNA decay-inducing exon from a pre-mRNA that contains the NMD exon and encodes Na_{V}1.1 protein. In some embodiments, the compound promotes exclusion of the NMD exon from the pre-mRNA that contains the NMD exon and that encodes the Na_{V}1.1 protein. In some embodiments, the compound binds to a targeted portion of a pre-mRNA that contains the NMD exon and that encodes the Na_{V}1.1 protein. In some embodiments, the compound increases a level of processed mRNA encoding the Na_{V}1.1 protein when the ASO is introduced into the cell. In some embodiments, the compound increases a level of the Na_{V}1.1 protein when the compound is introduced into the cell. In some embodiments, the targeted portion is within an intron sequence flanking the NMD exon. In some embodiments, the targeted portion comprises at least one nucleotide of the NMD exon. In some embodiments, the targeted portion is within the NMD exon. In some embodiments, the brain concentration of the compound after administration of the pharmaceutical composition is at least 1, 2, 4, 6, 8, or 10 μg/ml.

### INCORPORATION BY REFERENCE

[0026] All publications, patents, and patent applications mentioned in this specification are herein incorporated by reference to the same extent as if each individual publication, patent, or patent application is specifically and individually indicated to be incorporated by reference.

### BRIEF DESCRIPTION OF THE DRAWINGS

[0027] The features of the present disclosure are set forth with particularity in the appended claims. A better understanding of the features and advantages of the present disclosure will be obtained by reference to the following detailed description that sets forth illustrative embodiments, in which the principles of the disclosure are utilized, and the accompanying drawings of which:

[0028] FIGS. 1A-1B depict schematic representations of a target pre-mRNA that contains a nonsense-mediated RNA decay-inducing exon (NMD exon mRNA) and therapeutic agent-mediated exclusion of the nonsense-mediated mRNA decay-inducing exon from the pre-mRNA to increase expression of the full-length target protein or functional RNA. FIG. 1A shows a cell divided into nuclear and cytoplasmic compartments. In the nucleus, a pre-mRNA transcript of a target gene undergoes splicing to generate processed mRNA, and this processed mRNA is exported to the cytoplasm and translated into target protein. For this exemplary target gene, some fraction of the processed mRNA contains a nonsense-mediated mRNA decay-inducing exon (NMD exon mRNA) that is degraded in the cytoplasm, thus leading to no target protein production. FIG. 1B shows an example of the same cell divided into nuclear and cytoplasmic compartments. Treatment with a therapeutic agent, such as an antisense oligomer (ASO), promotes the exclusion of the nonsense-mediated mRNA decay-inducing exon from the pre-mRNA and results in an increase in processed mRNA, which is in turn translated into higher levels of target protein.

[0029] FIG. 1C is a schematic representation of therapeutic ASO-mediated exclusion of a nonsense-mediated mRNA decay-inducing exon from a pre-mRNA, which decreases non-productive processed mRNA (e.g., with an NMD exon) and increases productive mRNA (e.g., without an NMD exon) and increases expression of the full-length target protein from the productive mRNA.

[0030] FIG. 1D shows identification of an exemplary sequence in the SCN1A gene that encodes a nonsense-mediated mRNA decay (NMD)-inducing exon. The identification of the sequence in the SCN1A gene that encodes the NMD-inducing exon using comparative genomics is shown, visualized in the UCSC genome browser. The upper panel shows a graphic representation of the SCN1A gene to scale. The conservation level across 100 vertebrate species is shown as peaks. The highest peaks correspond to exons (black boxes), while no peaks are observed for the majority of the introns (lines with arrow heads). Peaks of conservation were identified in intron 20 (NM_006920), shown in the middle panel. Inspection of the conserved sequences identified an exon-like sequence of 64 bp (bottom panel, sequence highlighted in grey) flanked by 3′ and 5′ splice sites (underlined sequence). Inclusion of this exon leads to a frameshift and the introduction of a premature termination codon in exon 21 rendering the transcript a target of NMD. Figure discloses SEQ ID NO: 1101.

[0031] FIG. 2 shows a study design timeline for monitoring wild-type (WT) and Dravet Syndrome (DS) mice as well as a Kaplan-Meier curve showing DS and WT littermate mice monitored to 14 weeks for survival.

[0032] FIG. 3 shows an experimental design for the EEG seizure monitoring study in DS mice and their WT littermates.

[0033] FIGS. 4A-4E show the results of monitoring seizures in mice administered with ASO-22 or phosphate buffered saline (PBS). FIG. 4A shows exemplary EEG recordings in DS mice. FIG. 4B shows the number of seizures occurring in various regions of the brain in the two mice groups. * Indicates p<0.05. FIG. 4C summarizes the total number of spontaneous seizures (generalized and focal) recorded between P22 and P46 in DS mice dosed with PBS (n=21) or ASO-22 (n=21). * Indicates p<0.05. FIG. 4D shows the number of mice that had a number of seizures in each group. FIG. 4E shows the effect of ASO-22 on the latency to the first recorded seizure between P22 and P46 in DS mice dosed with PBS (n=21) or ASO-22 (n=21).

[0034] FIGS. 5A-5G show that a single ICV injection of 20 μg ASO-22 at P2 results in reduced sudden unexpected death in epilepsy (SUDEP) incidence and increased Na_{V}1.1 protein expression in DS mice. FIG. 5A is a schematic for the experimental design. FIGS. 5B, 5C, 5D, 5E, 5F, and 5G illustrate the ASO-22 exposure, Scn1a expression, and Na_{V}1.1 expression in brain tissues at 7 weeks or 14 weeks after a single ICV injection of ASO-22 (20 μg) or PBS on P2, respectively.

[0035] FIGS. 6A-6B show the percent survival of DS and WT mice after a single ICV injection of ASO-22 (60 μg) or PBS on P14. FIG. 6A is a schematic showing the study design. FIG. 6B is a line chart showing the percent survival (y-axis) of the mice in various conditions (wild-type mice treated with PBS; wild-type mice treated with ASO-22; Scn1a^{+/-} mice treated with ASO-22; and Scn1a^{+/-} mice treated with PBS) over the course of days (x-axis).

[0036] FIGS. 7A-7F show the ASO-22 exposure, Scn1a expression, and Na_{V}1.1 expression in brain tissues at P35 and P90 after a single ICV injection of ASO-22 (60 μg) or PBS on P14, respectively. FIG. 7A illustrates the concentration of ASO-22 in brain tissue (μg/g), FIG. 7B shows the fold change of Scn1a gene expression, and FIG. 7C shows the Na_{V}1.1 expression relative to adult brain tissue at P35 for wild-type and Scn1a^{+/-} mice after ICV injection with either ASO-22 (60 μg) or PBS on P14. FIG. 7D illustrates the concentration of ASO-22 in brain tissue (μg/g), FIG. 7E shows the fold change of Scn1a gene expression, and FIG. 7F shows the Na_{V}1.1 expression relative to adult brain tissue at P90 for wild-type and Scn1a^{+/-} mice after ICV injection with either ASO-22 (60 μg) or PBS on P14.

[0037] FIG. 8 shows the experimental conditions and numbers of monkeys used per group.

[0038] FIGS. 9A-9B show the levels of ASO-22 in the cynomolgus monkey brain on study day 3 (FIG. 9A) and day 29 (FIG. 9B).

[0039] FIGS. 10A-10B show the levels of Na_{V}1.1 protein in cynomolgus monkey brain regions on study day 3 (FIG. 10A) and day 29 (FIG. 10B).

[0040] FIGS. 11A-11B show the percentages of productive SCN1A gene to total SCN1A gene as an evaluation of target engagement in cynomolgus monkeys on study day 3 (FIG. 11A) and day 29 (FIG. 11B).

[0041] FIG. 12A shows the plasma pharmacokinetics in cynomolgus monkey after Intrathecal Administration of ASO-22. FIG. 12B shows the levels of ASO-22 in the cynomolgus monkey cerebrospinal fluid (CSF) on study day 3 and 29.

[0042] FIGS. 13A-13D depict identification of an alternative splicing event in SCN1A that results in NMD. FIG. 13A shows SCN1A splicing isoforms with or without inclusion of the alternative exon in ReNcells as demonstrated by RT-PCR. FIG. 13B shows evaluation of the alternative splice event of the SCN1A gene in the cerebral cortex from 4 species. FIG. 13C shows an image of a TBE PAGE gel of RT-PCR products corresponding to Scn1a productive (lower bands, 498 bp) and non-productive transcript (upper bands, 562 bp) amplified from total RNA extracted from WT C57BL/6J mouse brains from P0 to P20 and at 10 months. Mouse Gapdh was used as a loading control. FIG. 13D summarizes expression of Scn1a productive and non-productive transcript in postnatal mouse brains, calculated with optical densities of PCR products shown in FIG. 13C.

[0043] FIGS. 14A-14E depict that selected ASOs suppressed the NMD splicing event and increased the expression of productive SCN1A mRNA in ReNcells. FIG. 14A is an exemplary TBE PAGE gel image of RT-PCR products corresponding to SCN1A productive (lower bands, 549 bp) and non-productive mRNA containing exon 20X (upper bands, 613 bp) in ReNcells after gymnotic (free) uptake of ASO. FIG. 14B is a histogram showing the percentage of Exon 20X inclusion (y-axis) after treatment with various ASOs (x-axis). FIG. 14C is a histogram showing the fold change in Scn1a gene expression (y-axis) after treatment with various ASOs (x-axis). FIG. 14D is a graph illustrating the fold change in Scn1a gene expression (y-axis) after treatment with ASO-22 at various concentrations in nM (x-axis) by free uptake or nucleofection. FIG. 14E is a histogram showing the fold change in Scn1a gene expression (y-axis) after treatment with either a non-targeting ASO (NT) or ASO-22, each at various concentrations (20 μM, 8 μM, 3 μM) (x-axis).

[0044] FIGS. 15A-15C show dose-dependent effects of ASO-22 on splicing and expression of SCN1A mRNA in ReNcells. FIG. 15A shows an exemplary TBE PAGE gel image of RT-PCR products corresponding to SCN1A productive mRNA (lower bands, 549 bp) and non-productive mRNA containing exon 20X (upper bands, 613 bp) in ReNcells. RPL32 was used as the loading control. FIG. 15B is a histogram showing the fold change in SCN1A productive mRNA after treatment with various controls (sham, sham with cycloheximide, non-targeting (NT) ASO, or NT ASO with cycloheximide), ASO-22 at various concentrations (20 μM, 8 μM, 3 μM), or ASO-22 with cycloheximide at various concentrations (20 μM, 8 μM, 3 μM) as indicated on the x-axis. FIG. 15C is a histogram showing the fold change in SCN1A non-productive mRNA after treatment with various controls (sham, sham with cycloheximide, non-targeting (NT) ASO, or NT ASO with cycloheximide), ASO-22 at various concentrations (20 μM, 8 μM, 3 μM), or ASO-22 with cycloheximide at various concentrations (20 μM, 8 μM, 3 μM) as indicated on the x-axis.

[0045] FIGS. 16A-16H depict ASO-22 ICV injection causes dose-dependent and durable increases in Scn1a mRNA and Na_{V}1.1 protein expression in mouse brain. FIG. 16A is a schematic illustrating the experimental study design for ASO-22. FIG. 16B is a graph showing the percentage of Exon 21X inclusion (amount of non-productive Scn1a transcript) after a single ICV injection of ASO-22 at 0.3, 1, 3, 5, 10, 20 or 30 μg (x-axis). FIG. 16C is a graph showing the fold change in mRNA (amount of productive Scn1a transcript) after a single ICV injection of ASO-22 at 0.3, 1, 3, 5, 10, 20 or 30 μg (x-axis). FIG. 16D is a graph showing the percentage of Na_{V}1.1 protein expression relative to adult brain tissue after a single ICV injection of ASO-22 at 0.3, 1, 3, 5, 10, 20 or 30 μg (x-axis). FIG. 16E is a histogram showing the effect of ASO-22 (fold change in mRNA) on expression of the 9 VGSC α subunit genes in mouse brain. Expression of Scn1a productive transcript and the remaining 8 VGSC α subunit genes plus Nax (Scn7a) in mouse brains following ICV injection of PBS, a non-target ASO control (NT, 20 μg) or different doses of ASO-22 was measured by probe-based qPCR. Expression of each transcript was first normalized to endogenous Gapdh then compared to PBS injection controls. FIG. 16F is a schematic of the experimental study design used to determine the durability of the ASO-22 effect in brain. FIG. 16G shows the relative expression of productive Scn1a transcript (y-axis) after treatment with ASO-22 or PBS over the course of days (x-axis). FIG. 16H shows the percentage of Na_{V}1.1 protein expression relative to adult brain tissue (y-axis) after treatment with ASO-22 or PBS over the course of days (x-axis).

[0046] FIG. 17 shows dose-dependent effects of ASO-22 on expression of Scn1a mRNA in ICV-injected neonatal mouse brains (§ =nonproductive; *=productive).

[0047] FIG. 18 shows dose-dependent effects of ASO-22 on expression of Na_{V}1.1 in ICV-injected neonatal mouse brains.

[0048] FIG. 19 shows expression of Scn1a mRNA in mouse brains at different post-injection days (§ =nonproductive; *=productive).

[0049] FIG. 20 shows expression of Na_{V}1.1 in mouse brains at different post-injection days.

[0050] FIG. 21 shows validation of the two anti-Na_{V}1.1 antibodies used in the Examples. Specificity of the two anti-Na_{V}1.1 antibodies, Alomone ASC-001 and NeuroMab 75-023, was tested using total protein prepared from a Scn1a^{31/-} mouse brain (middle lane) and brains of two WT littermates (left and right lanes).

[0051] FIG. 22 shows a schematic representation of clinical manifestations of Dravet Syndrome and their relative incidences according to age. AA: atypical absences; AE: acute encephalopathy; CG: crouching gait; CPS: complex partial seizures; DD: developmental delay; DS: Dravet syndrome; EEG: electroencephalogram; FSz: complex febrile seizures; GMS: generalized motor seizures; HS: hyperthermia sensitivity; m: month; MSz: myoclonic seizures; OS: obtundation status; SE: status epilepticus; SUDEP: sudden unexpected death in epilepsy; y: years; * Moderate fever for 60%, mostly clonic generalized and unilateral motor seizures; ** Difficult to distinguish between AA and CPS without ictal EEG recording, so their precise incidence is unknown. See, e.g., Gataullina and Dulac, 2017, of which the entire content is incorporated herein by reference.

[0052] FIG. 23 shows TANGO (Targeted Augmentation of Nuclear Gene Output) that may be used to treat Dravet syndrome.

[0053] FIG. 24 shows the transformative potential of TANGO technology in Dravet syndrome.

[0054] FIG. 25 shows the study design. Phase 1/2a open-label, 2-part study conducted at approximately 20 sites in the United States.

[0055] FIG. 26 shows a schematic representation of the study design.

[0056] FIG. 27 shows patient inclusion and exclusion criteria.

[0057] FIG. 28 shows study assessments.

[0058] FIG. 29 shows workflow of a Phase 1/2a study of Compound-A.

[0059] FIG. 30 shows two plots summarizing cerebrospinal fluid (CSF) exposure of Compound-A in single ascending dose (SAD) cohorts and multiple ascending dose (MAD) cohorts, respectively.

[0060] FIGS. 31A-31B show two plots summarizing mean percent change in seizure frequency from baseline level to the period between Day 29 and 84 post administration of Compound-A (in reference to 1^{st} dose, Day 29-84) in 2- to 12-year-old subjects (FIG. 31A) and 13- to 18-year-old (FIG. 31B), all combined by cohort.

[0061] FIGS. 32A-32B show two plots summarizing mean percent change in seizure frequency from baseline in patients of all ages as combined by cohort in the period between Day 1 and Day 84 (Day 1-84) post administration (FIG. 32A), and in the period between Day 29-84 (Day 29-84) post administration (FIG. 32B).

[0062] FIGS. 33A-33C show the study design for the Phase 1/2a clinical trials for ASO-1. FIG. 33A shows the study design and dosing schedule using the Single Ascending Dose (SAD) regime (MONARCH) before patients can become eligible to enroll in the LONGWING OLE. FIG. 33B shows the study design and dosing schedule using the Multiple Ascending Dose regime (MONARCH) before patients can become eligible to enroll in the LONGWING OLE. FIG. 33C shows the study design and dosing schedule using the Multiple Ascending Dose regime (ADMIRAL) before patients can become eligible to enroll in the LONGWING OLE.

[0063] FIG. 34 shows a plot summarizing mean percent change in seizure frequency from baseline in patients of all ages receiving 30 mg, 45 mg of ASO-1 as combined by cohort in the period between Day 1 and Day 225 post administration in the MONARCH study and the mean percent change in seizure frequency from baseline in patients of all ages receiving 30 mg, 45 mg, or 70 mg of ASO-1 as combined by cohort in the period between Day 1 and Day 225 post administration in the ADMIRAL study.

[0064] FIG. 35 shows a plot summarizing mean percent change in seizure frequency from baseline in patients of all ages receiving 30 mg or 45 mg of ASO-1 as combined by cohort in the period between Day 29 and Day 85 post administration in the MONARCH study and the mean percent change in seizure frequency from baseline in patients of all ages receiving 30 mg, 45 mg, or 70 mg of ASO-1 as combined by cohort in the period between Day 29 and Day 87 post administration in the ADMIRAL study.

[0065] FIGS. 36A-36B show plots summarizing mean percent change in seizure frequency from baseline in patients between ages 2-12 and between ages 13-18 years receiving 30 mg or 45 mg of ASO-1 as combined by cohort in the period between Day 1 and Day 225 post administration in the MONARCH study. FIG. 36A shows a plot summarizing mean percent change in seizure frequency from baseline in patients between ages 2-12 and between ages 13-18 years receiving 30 mg of ASO-1 as combined by cohort in the period between Day 1 and Day 225 post administration in the MONARCH study. FIG. 36B shows a plot summarizing mean percent change in seizure frequency from baseline in patients between ages 2-12 and between ages 13-18 years receiving 45 mg of ASO-1 as combined by cohort in the period between Day 1 and Day 225 post administration in the MONARCH study.

[0066] FIGS. 37A-37C show plots summarizing mean percent change in seizure frequency from baseline in patients between ages 2-12 and between ages 13-18 years receiving 30 mg, 45 mg, or 70 mg of ASO-1 as combined by cohort in the period between Day 1 and Day 252 post administration in the ADMIRAL study. FIG. 37A shows a plot summarizing mean percent change in seizure frequency from baseline in patients between ages 2-12 and between ages 13-18 years receiving 30 mg of ASO-1 as combined by cohort in the period between Day 1 and Day 252 post administration in the ADMIRAL study. FIG. 37B shows a plot summarizing mean percent change in seizure frequency from baseline in patients between ages 2-12 and between ages 13-18 years receiving 45 mg of ASO-1 as combined by cohort in the period between Day 1 and Day 252 post administration in the ADMIRAL study. FIG. 37C shows a plot summarizing mean percent change in seizure frequency from baseline in patients between ages 2-12 and between ages 13-18 years receiving 70 mg of ASO-1 as combined by cohort in the period between Day 1 and Day 252 post administration in the ADMIRAL study.

[0067] FIG. 38 shows a plot summarizing mean percent change in seizure frequency from baseline in patients between ages 2-12 and between ages 13-18 years receiving 2 or 3 doses of 70 mg of ASO-1, as combined by cohort in the period between Day 1 and Day 252 post administration in the ADMIRAL study.

[0068] FIGS. 39A-39B show plots summarizing mean percent change in seizure frequency from baseline in all patients receiving 30 mg, 45 mg, or 70 mg of ASO-1, as analyzed 3 or 6 months post last dose administration. FIG. 39A shows a plot summarizing mean percent change in seizure frequency from baseline in all patients receiving 30 mg, 45 mg, or 70 mg of ASO-1, as analyzed 3 months post last dose administration. FIG. 39B shows a plot summarizing mean percent change in seizure frequency from baseline in all patients receiving 30 mg, 45 mg, or 70 mg of ASO-1, as analyzed 6 months post last dose administration.

[0069] FIGS. 40A-40B show plots summarizing mean percent change in seizure frequency from baseline in all patients receiving 2 or 3 doses of 70 mg of ASO-1, as analyzed 3 or 6 months post last dose administration in the ADMIRAL study. FIG. 40A shows a plot summarizing mean percent change in seizure frequency from baseline in all patients receiving 2 or 3 doses of 70 mg of ASO-1, as analyzed 3 months post last dose administration in the ADMIRAL study. FIG. 40B shows a plot summarizing mean percent change in seizure frequency from baseline in all patients receiving 2 or 3 doses of 70 mg of ASO-1, as analyzed 6 months post last dose administration in the ADMIRAL study.

[0070] FIG. 41 shows a plot summarizing mean percent change in seizure frequency from baseline in all patients receiving 30 mg or 45 mg of ASO-1 maintenance dose every 4 months in the OLE study.

[0071] FIGS. 42A-42B show plots showing improvement in receptive communication and expressive communication in patients receiving ASO-1 for over one year of dosing compared to observed natural history of the disease measured on the Vineland (VABS-III) scale. FIG. 42A shows a plot showing improvement in receptive communication in patients receiving ASO-1 for over one year of dosing compared to observed natural history of the disease measured on the Vineland (VABS-III) scale. FIG. 42B shows a plot showing improvement in receptive communication in patients receiving ASO-1 for over one year of dosing compared to observed natural history of the disease measured on the Vineland (VABS-III) scale.

[0072] FIG. 43 shows a plot showing improvement in gross motor skills in patients receiving ASO-1 for over one year of dosing compared to observed natural history of the disease measured on the Vineland (VABS-III) scale.

[0073] FIG. 44 shows a plot showing improvement in executive function in patients receiving ASO-1 for over one year of dosing compared to observed natural history of the disease measured on the Vineland (VABS-III) scale.

[0074] FIGS. 45A-45B show plots showing improvement in clinical and caregiver impression of change in patients receiving ASO-1 for over one year of dosing compared to observed natural history of the disease measured on the Vineland (VABS-III) scale. FIG. 45A shows a plot showing improvement in clinical impression of change in patients receiving ASO-1 for over one year of dosing compared to observed natural history of the disease measured on the Vineland (VABS-III) scale. FIG. 45B shows a plot showing improvement in caregiver impression of change in patients receiving ASO-1 for over one year of dosing compared to observed natural history of the disease measured on the Vineland (VABS-III) scale.

### DETAILED DESCRIPTION

[0075] Certain specific details of this description are set forth in order to provide a thorough understanding of various embodiments. However, one skilled in the art will understand that the present disclosure may be practiced without these details. In other instances, well-known structures have not been shown or described in detail to avoid unnecessarily obscuring descriptions of the embodiments.

[0076] Unless otherwise defined, all technical and scientific terms used herein have the same meaning as commonly understood by one of ordinary skill in the art to which this disclosure belongs. Although methods and materials similar or equivalent to those described herein can be used in the practice or testing of the present disclosure, suitable methods, and materials are described below.

### Definitions

[0077] As used in this specification and the appended claims, the singular forms “a,” “an,” and “the” include plural referents unless the content clearly dictates otherwise.

[0078] It should be noted that the term “or” is generally employed in its sense including “and/or” unless the content clearly dictates otherwise. The terms “and/or” and “any combination thereof” and their grammatical equivalents as used herein, can be used interchangeably. These terms can convey that any combination is specifically contemplated. Solely for illustrative purposes, the following phrases “A, B, and/or C” or “A, B, C, or any combination thereof” can mean “A individually; B individually; C individually; A and B; B and C; A and C; and A, B, and C.” The term “or” can be used conjunctively or disjunctively, unless the context specifically refers to a disjunctive use.

[0079] The term “about” or “approximately” can mean within an acceptable error range for the particular value as determined by one of ordinary skill in the art, which will depend in part on how the value is measured or determined, i.e., the limitations of the measurement system. For example, “about” can mean within 1 or more than 1 standard deviation, per the practice in the art. Alternatively, “about” can mean a range of up to 20%, up to 10%, up to 5%, or up to 1% of a given value. Alternatively, particularly with respect to biological systems or processes, the term can mean within an order of magnitude, within 5-fold, and more preferably within 2-fold, of a value. Where particular values are described in the application and claims, unless otherwise stated, the term “about” meaning within an acceptable error range for the particular value should be assumed.

[0080] As used in this specification and claim(s), the words “comprising” (and any form of comprising, such as “comprise” and “comprises”), “having” (and any form of having, such as “have” and “has”), “including” (and any form of including, such as “includes” and “include”) or “containing” (and any form of containing, such as “contains” and “contain”) are inclusive or open-ended and do not exclude additional, unrecited elements or method steps. It is contemplated that any embodiment discussed in this specification can be implemented with respect to any method or composition of the present disclosure, and vice versa. Furthermore, compositions of the present disclosure can be used to achieve methods of the present disclosure.

[0081] Reference in the specification to “embodiments,” “some embodiments,” “an embodiment,” “one embodiment,” “certain embodiments,” or “other embodiments” means that a particular feature, structure, or characteristic described in connection with the embodiments is included in at least some embodiments, but not necessarily all embodiments, of the present disclosures. To facilitate an understanding of the present disclosure, a number of terms and phrases are defined below.

[0082] The terms “oligonucleotide sequence,” “nucleic acid sequence,” “polynucleic acid sequence,” “nucleotide sequence,” and “nucleotide acid sequence” are used herein interchangeably in its broadest sense and have the identical meaning herein and refer to preferably DNA or RNA. A nucleic acid sequence is a polymer comprising or consisting of nucleotide monomers, which are covalently linked to each other by phosphodiester-bonds of a sugar/phosphate-backbone. The term “nucleic acid sequence” also encompasses modified nucleic acid sequences, such as base-modified, sugar-modified or backbone-modified, etc., DNA or RNA.

[0083] The term “fragment,” or “fragment of a sequence,” which have the identical meaning herein, is a shorter portion of a full-length sequence of e.g., a nucleic acid molecule like DNA or RNA or a protein. Accordingly, a fragment, typically, consists of a sequence that is identical to the corresponding stretch within the full-length sequence. A preferred fragment of a sequence in the context of the present invention consists of a continuous stretch of entities, such as nucleotides or amino acids corresponding to a continuous stretch of entities in the molecule the fragment is derived from, which represents at least 1%, at least 2%, at least 3%, at least 4%, at least 5%, at least 6%, at least 7%, at least 8%, at least 9%, at least 10%, at least 15%, at least 20%, at least 25%, at least 30%, at least 35%, at least 40%, at least 45%, at least 50%, at least 55%, at least 60%, at least 65%, at least 70%, at least 75%, at least 80%, at least 85%, at least 90%, at least 95%, at least 97%, at least 98%, at least 99%, at least 99.5%, or even 100% of the total (i.e., full-length) molecule from which the fragment is derived. For example, a “fragment” or “functional fragment” of a polynucleotide or a polypeptide is a fragment of the polynucleotide or the polypeptide that is shorter than the full-length, immature, or mature nucleotide or polypeptide and has at least 1%, at least 2%, at least 3%, at least 4%, at least 5%, at least 6%, at least 7%, at least 8%, at least 9%, at least 10%, at least 15%, at least 20%, at least 25%, at least 30%, at least 35%, at least 40%, at least 45%, at least 50%, at least 55%, at least 60%, at least 65%, at least 70%, at least 75%, at least 80%, at least 85%, at least 90%, at least 95%, at least 97%, at least 98%, at least 99%, at least 99.5%, or even 100% or more of the activity of the full-length mature reference polynucleotide or polypeptide. Fragments of interest can be made by recombinant, synthetic, or digestive methods.

[0084] The term “recombinant” when used with reference, for example, to a cell, a nucleic acid, a protein, or a vector, indicates that the cell, nucleic acid, protein, or vector has been modified by or is the result of laboratory methods. Thus, for example, the term “recombinant polynucleotide” can refer to a polynucleotide that is not naturally occurring and are synthesized or manipulated in vitro, such as polynucleotides produced by laboratory methods. A recombinant polynucleotide can be synthesized in a laboratory and/or can be prepared by using recombinant DNA technology by using enzymatic modification of DNA, such as enzymatic restriction digestion, ligation, and cloning. A recombinant polypeptide can be prepared by in vitro transcription of a recombinant DNA followed by in vitro translation of the produced messenger RNA (mRNA). Alternatively, under suitable conditions, a recombinant polynucleic acid or RNA can be incorporated into a cell and a recombinant polypeptide can be expressed within the cell. Recombinant proteins can include amino acid residues not found within the native (non-recombinant) form of the protein or can be include amino acid residues that have been modified, e.g., labeled.

[0085] The term “isolated” means separated from constituents, cellular and otherwise, in which the polynucleotide, polypeptide, protein, or fragments thereof, are normally associated with in nature. For example, with respect to a polynucleotide, an isolated polynucleotide is one that is separated from the 5′ and 3′ ends with which it is normally associated in the naturally occurring sequence. As is apparent to those of skill in the art, a non-naturally occurring polynucleotide, polypeptide, protein, or fragments thereof, does not require “isolation” to distinguish it from its naturally occurring counterpart. In addition, a “concentrated”, “separated” or “diluted” polynucleotide, polypeptide, protein, or fragments thereof, is distinguishable from its naturally occurring counterpart in that the concentration or number of molecules per volume is greater than “concentrated” or less than “separated” or “diluted” than that of its naturally occurring counterpart.

[0086] As used herein, “nucleotide” means a nucleoside further comprising a phosphate linking group. As used herein, “linked nucleosides” may or may not be linked by phosphate linkages and thus includes, but is not limited to, “linked nucleotides.” As used herein, “linked nucleosides” are nucleosides that are connected in a continuous sequence (i.e., no additional nucleosides are present between those that are linked).

[0087] As used herein, “nucleobase” means a group of atoms that can be linked to a sugar moiety to create a nucleoside that is capable of incorporation into an oligonucleotide, and wherein the group of atoms is capable of bonding with a complementary naturally occurring nucleobase of another oligonucleotide or nucleic acid. Nucleobases may be naturally occurring or may be modified.

[0088] As used herein, “nucleoside” means a compound comprising a nucleobase moiety and a sugar moiety. Nucleosides include, but are not limited to, naturally occurring nucleosides (as found in DNA and RNA) and modified nucleosides. Nucleosides may be linked to a phosphate moiety.

[0089] As used herein, “naturally occurring sugar moiety” means a ribofuranosyl as found in naturally occurring RNA or a deoxyribofuranosyl as found in naturally occurring DNA.

[0090] As used herein, “sugar moiety” means a naturally occurring sugar moiety or a modified sugar moiety of a nucleoside.

[0091] As used herein, “modified sugar moiety” means a substituted sugar moiety, a bicyclic or tricyclic sugar moiety, or a sugar surrogate.

[0092] The terms “identical” or percent “identity,” in the context of two or more nucleic acids or polypeptide sequences, refer to two or more sequences or subsequences that are the same or have a specified percentage of nucleotides or amino acid residues that are the same (i.e., 30%, 35%, 40%, 45%, 50%, 55%, 60%, 65%, 70%, 75%, 80%, 85%, 90%, 95%, 98%, 99%, 99.5%, 99.8%, 99.9%, or 100% identity over a specified region, e.g., of the entire polypeptide sequences of the invention or individual domains of the polypeptides of the invention), when compared and aligned for maximum correspondence over a comparison window, or designated region as measured using a sequence comparison algorithm or by manual alignment and visual inspection. Such sequences that are at least about 80% identical are said to be “substantially identical.” In some embodiments, two sequences are 100% identical. In some embodiments, two sequences are 100% identical over the entire length of one of the sequences (e.g., the shorter of the two sequences where the sequences have different lengths). In various embodiments, identity may refer to the complement of a test sequence.

[0093] In some embodiments, the identity exists over a region that is at least about 2 to about 400 amino acids or nucleotides in length. In some embodiments, the identity exists over a region that is at least about 2 to about 390, at least about 2 to about 380, at least about 2 to about 370, at least about 2 to about 360, at least about 2 to about 350, at least about 2 to about 340, at least about 2 to about 330, at least about 2 to about 320, at least about 2 to about 310, at least about 2 to about 300, at least about 2 to about 290, at least about 2 to about 280, at least about 2 to about 270, at least about 2 to about 260, at least about 2 to about 250, at least about 2 to about 200, at least about 2 to about 150, at least about 2 to about 100 amino acids or nucleotides in length. In some embodiments, the identity exists over a region that is at least about 2 to about 90, at least about 2 to about 85, at least about 2 to about 80, at least about 2 to about 75, at least about 2 to about 70, at least about 2 to about 65, at least about 2 to about 60, at least about 2 to about 55, at least about 2 to about 50, at least about 2 to about 45, at least about 2 to about 40, at least about 2 to about 35, at least about 2 to about 30, at least about 2 to about 25, at least about 2 to about 20, at least about 2 to about 10, at least about 2 to about 5 amino acids or nucleotides in length.

[0094] In some embodiments, the identity exists over a region that is at least about 3 to about 400, about 4 to about 400, about 5 to about 400, about 6 to about 400, about 7 to about 400, about 8 to about 400, about 9 to about 400, about 10 to about 400, about 11 to about 400, about 12 to about 400, about 13 to about 400, about 14 to about 400, about 15 to about 400, about 16 to about 400, about 17 to about 400, about 18 to about 400, about 19 to about 400, about 20 to about 400, about 21 to about 400, about 22 to about 400, about 23 to about 400, about 24 to about 400, about 25 to about 400, about 26 to about 400, about 27 to about 400, about 28 to about 400, about 29 to about 400, about 30 to about 400, about 31 to about 400, about 32 to about 400, about 33 to about 400, about 34 to about 400, about 35 to about 400 amino acids or nucleotides in length. In some embodiments, the identity exists over a region that is at least about 40 to about 400, about 45 to about 400, about 50 to about 400, about 55 to about 400, about 60 to about 400, about 61 to about 400, about 62 to about 400, about 63 to about 400, about 64 to about 400, about 65 to about 400, about 66 to about 400, about 67 to about 400, about 68 to about 400, about 69 to about 400, about 70, to about 400, about 71 to about 400, about 72 to about 400, about 73 to about 400, about 74 to about 400, about 75 to about 400, about 80 to about 400, about 85 to about 400, about 90 to about 400, about 100 to about 400, about 150 to about 400, about 200 to about 400, about 250 to about 400, about 300 to about 400, about 350 to about 400 amino acids or nucleotides in length.

[0095] In some embodiments, the identity exists over a region that is at least about 2 to about 343, about 3 to about 343, about 4 to about 343, about 7 to about 343, about 9 to about 343, about 11 to about 343, about 15 to about 343, about 16 to about 343, about 20 to about 343, about 25 to about 343, about 62 to about 343, about 2 to about 317, about 3 to about 317, about 4 to about 317, about 7 to about 317, about 9 to about 317, about 11 to about 317, about 15 to about 317, about 16 to about 317, about 20 to about 317, about 25 to about 317, about 62 to about 317, about 2 to about 300, about 3 to about 300, about 4 to about 300, about 7 to about 300, about 9 to about 300, about 11 to about 300, about 15 to about 300, about 16 to about 300, about 20 to about 300, about 25 to about 300, about 62 to about 300, about 2 to about 62, about 3 to about 62, about 4 to about 62, about 7 to about 62, about 9 to about 62, about 11 to about 62, about 15 to about 62, about 16 to about 62, about 20 to about 62, about 25 to about 62 amino acids or nucleotides in length.

[0096] The term “genetically modified” means containing and/or expressing a foreign gene or nucleic acid sequence which in turn, modifies the genotype or phenotype of the cell or its progeny. In other words, it refers to any addition, deletion, or disruption to a cell's endogenous nucleotides.

[0097] The term “operably linked” can refer to a functional relationship between two or more nucleic acid sequences, e.g., a functional relationship of a transcriptional regulatory or signal sequence to a transcribed sequence. For example, a target motif or a nucleic acid encoding a target motif is operably linked to a coding sequence if it is expressed as a preprotein that participates in targeting the polypeptide encoded by the coding sequence to a cell membrane, intracellular, or an extracellular compartment. For example, a signal peptide or a nucleic acid encoding a signal peptide is operably linked to a coding sequence if it is expressed as a preprotein that participates in the secretion of the polypeptide encoded by the coding sequence. For example, a promoter is operably linked if it stimulates or modulates the transcription of the coding sequence.

[0098] The term “subject” or “patient” encompasses vertebrates or mammals. Examples of mammals include, but are not limited to, any member of the mammalian class: humans, non-human primates such as chimpanzees, and other apes and monkey species; farm animals such as cattle, horses, sheep, goats, swine; domestic animals such as rabbits, dogs, and cats; laboratory animals including rodents, such as rats, mice, guinea pigs, and the like. In one aspect, the mammal is a human. The term “animal” as used herein comprises human beings and non-human animals. In one embodiment, a “non-human animal” is a mammal, for example, a rodent such as rat or a mouse. In one embodiment, a non-human animal is a mouse.

[0099] A “control” is an alternative subject or sample used in an experiment for comparison purpose. A control can be “positive” or “negative.”

### Methods of Treatment

[0100] In some aspects, provided herein is a method of treating or preventing a disease or condition characterized by a reduced expression or function of Na_{V}1.1 protein in a human subject in need thereof comprising administering to the human subject a pharmaceutical composition comprising a compound at a first dose of about 0.1, 0.5, 1, 2.5, 5, 6, 7, 8, 9, 10, 11, 12, 13, 14, 15, 16, 17, 18, 19, 20, 25, 30, 35, 40, 45, 50, 55, 60, 65, 70, 75, 80, 85, 90, 95, 100, 105, 110, 115, 120, 125, 130, 135, 140, 145, 150, 155, 160, 165, 170, 175, 180, 185, 190, 195, or 200 mg, wherein the compound is an antisense oligomer (ASO) that comprises a sequence with at least 80% sequence identity to any one of SEQ ID NOs: 21-67, 210-256 or 304-1099, thereby treating or preventing the disease or condition in the human subject. In some embodiments, the ASO comprises a sequence with at least 80% sequence identity to any one of the sequences listed in Tables 4A, 4B, 5A, 5B, 6A, 6B, 7, 8A, and 8B, thereby treating or preventing the disease or condition in the human subject.

[0101] In some aspects, provided herein is a method of treating or preventing a disease or condition characterized by a reduced expression or function of Na_{V}1.1 protein in a human subject in need thereof comprising administering to the human subject a pharmaceutical composition comprising a first dose of a compound, wherein the compound is an ASO that comprises a sequence with at least 80% sequence identity to any one of SEQ ID NOs: 21-67, 210-256 or 304-1099, thereby treating or preventing the disease or condition in the human subject; wherein the human subject is at most 18 years old. In some embodiments, the ASO comprises a sequence with at least 80% sequence identity to any one of the sequences listed in listed in Tables 4A, 4B, 5A, 5B, 6A, 6B, 7, 8A, and 8B, thereby treating or preventing the disease or condition in the human subject; wherein the human subject is at most 18 years old.

[0102] In some aspects, provided herein is a method of treating or preventing a disease or condition characterized by a reduced expression or function of Na_{V}1.1 protein in a human subject in need thereof comprising administering to the human subject a pharmaceutical composition comprising a single dose of an antisense oligomer (ASO), wherein the ASO comprises a sequence with at least 80% sequence identity to any one of SEQ ID NOs: 21-67, 210-256 or 304-1099, thereby treating or preventing the disease or condition in the human subject. In some embodiments, the ASO comprises a sequence with at least 80% sequence identity to any one of any one of the sequences listed in listed in Tables 4A, 4B, 5A, 5B, 6A, 6B, 7, 8A, and 8B, thereby treating or preventing the disease or condition in the human subject.

[0103] In some embodiments, the pharmaceutical composition is administered into the intrathecal space of the human subject. In some embodiments, the pharmaceutical composition is administered into the cerebrospinal fluid of the human subject. In some embodiments, the pharmaceutical composition is administered into the brain of the human subject. In some embodiments, the pharmaceutical composition is administered into the cerebrospinal fluid in the brain of the human subject.

[0104] In some embodiments, the pharmaceutical composition is administered as a bolus injection. In some embodiments, the pharmaceutical composition is administered by infusion with a delivery pump. In some embodiments, the pharmaceutical composition is administered by intracerebroventricular injection. In some embodiments, the pharmaceutical composition is administered by intrathecal injection.

### Therapeutic Dose

[0105] In some embodiments, the first dose is a single dose. In some embodiments, the method further comprises assessing tolerability or effectiveness of the pharmaceutical composition.

[0106] In some embodiments, the method as described herein comprises administering to the human subject a pharmaceutical composition comprising a compound as described herein at a first dose of about 0.1, 0.5, 1, 2.5, 5, 6, 7, 8, 9, 10, 11, 12, 13, 14, 15, 16, 17, 18, 19, 20, 25, 30, 35, 40, 45, 50, 55, 60, 65, 70, 75, 80, 85, 90, 95, 100, 105, 110, 115, 120, 125, 130, 135, 140, 145, 150, 155, 160, 165, 170, 175, 180, 185, 190, 195, or 200 mg.

[0107] In some embodiments, the method as described herein comprises administering to the human subject a pharmaceutical composition comprising the compound as described herein at a first dose of from about 0.1 to about 1000 mg, from about 0.2 to about 1000 mg, from about 0.3 to about 1000 mg, from about 0.4 to about 1000 mg, from about 0.5 to about 1000 mg, from about 0.6 to about 1000 mg, from about 0.7 to about 1000 mg, from about 0.8 to about 1000 mg, from about 0.9 to about 1000 mg, 1 to about 1000 mg, from about 2 to about 1000 mg, from about 3 to about 1000 mg, from about 4 to about 1000 mg, from about 5 to about 1000 mg, from about 6 to about 1000 mg, from about 7 to about 1000 mg, from about 8 to about 1000 mg, from about 9 to about 1000 mg, from about 10 to about 1000 mg, from about 15 to about 1000 mg, from about 20 to about 1000 mg, from about 25 to about 1000 mg, from about 30 to about 1000 mg, from about 35 to about 1000 mg, from about 40 to about 1000 mg, from about 45 to about 1000 mg, from about 50 to about 1000 mg, from about 55 to about 1000 mg, from about 60 to about 1000 mg, from about 65 to about 1000 mg, from about 70 to about 1000 mg, from about 75 to about 1000 mg, from about 80 to about 1000 mg, from about 85 to about 1000 mg, from about 90 to about 1000 mg, from about 95 to about 1000 mg, from about 100 to about 1000 mg, from about 150 to about 1000 mg, from about 200 to about 1000 mg, from about 250 to about 1000 mg, from about 300 to about 1000 mg, from about 350 to about 1000 mg, from about 400 to about 1000 mg, from about 450 to about 1000 mg, from about 500 to about 1000 mg, from about 550 to about 1000 mg, from about 600 to about 1000 mg, from about 650 to about 1000 mg, from about 700 to about 1000 mg, from about 750 to about 1000 mg, from about 800 to about 1000 mg, from about 850 to about 1000 mg, from about 900 to about 1000 mg, or from about 950 to about 1000 mg.

[0108] In some embodiments, the method as described herein comprises administering to the human subject a pharmaceutical composition comprising the compound as described herein at a first dose of from 0.1 to 1000 mg, from 0.2 to 1000 mg, from 0.3 to 1000 mg, from 0.4 to 1000 mg, from 0.5 to 1000 mg, from 0.6 to 1000 mg, from 0.7 to 1000 mg, from 0.8 to 1000 mg, from 0.9 to 1000 mg, 1 to 1000 mg, from 2 to 1000 mg, from 3 to 1000 mg, from 4 to 1000 mg, from 5 to 1000 mg, from 6 to 1000 mg, from 7 to 1000 mg, from 8 to 1000 mg, from 9 to 1000 mg, from 10 to 1000 mg, from 15 to 1000 mg, from 20 to 1000 mg, from 25 to 1000 mg, from 30 to 1000 mg, from 35 to 1000 mg, from 40 to 1000 mg, from 45 to 1000 mg, from 50 to 1000 mg, from 55 to 1000 mg, from 60 to 1000 mg, from 65 to 1000 mg, from 70 to 1000 mg, from 75 to 1000 mg, from 80 to 1000 mg, from 85 to 1000 mg, from 90 to 1000 mg, from 95 to 1000 mg, from 100 to 1000 mg, from 150 to 1000 mg, from 200 to 1000 mg, from 250 to 1000 mg, from 300 to 1000 mg, from 350 to 1000 mg, from 400 to 1000 mg, from 450 to 1000 mg, from 500 to 1000 mg, from 550 to 1000 mg, from 600 to 1000 mg, from 650 to 1000 mg, from 700 to 1000 mg, from 750 to 1000 mg, from 800 to 1000 mg, from 850 to 1000 mg, from 900 to 1000 mg, or from 950 to 1000 mg.

[0109] In some embodiments, the method as described herein comprises administering to the human subject a pharmaceutical composition comprising the compound as described herein at a first dose of from about 0.1 to about 950 mg, from about 0.1 to about 900 mg, from about 0.1 to about 850 mg, from about 0.1 to about 800 mg, from about 0.1 to about 750 mg, from about 0.1 to about 700 mg, from about 0.1 to about 650 mg, from about 0.1 to about 600 mg, from about 0.1 to about 550 mg, from about 0.1 to about 500 mg, from about 0.1 to about 450 mg, from about 0.1 to about 400 mg, from about 0.1 to about 350 mg, from about 0.1 to about 300 mg, from about 0.1 to about 250 mg, from about 0.1 to about 200 mg, from about 0.1 to about 150 mg, from about 0.1 to about 100 mg, from about 0.1 to about 95 mg, from about 0.1 to about 90 mg, from about 0.1 to about 85 mg, from about 0.1 to about 80 mg, from about 0.1 to about 75 mg, from about 0.1 to about 70 mg, from about 0.1 to about 65 mg, from about 0.1 to about 60 mg, from about 0.1 to about 55 mg, from about 0.1 to about 50 mg, from about 0.1 to about 45 mg, from about 0.1 to about 40 mg, from about 0.1 to about 35 mg, from about 0.1 to about 30 mg, from about 0.1 to about mg, from about 0.1 to about 25 mg, from about 0.1 to about 20 mg, from about 0.1 to about 10 mg, from about 0.1 to about 9 mg, from about 0.1 to about 8 mg, from about 0.1 to about 7 mg, from about 0.1 to about 6 mg, from about 0.1 to about 5 mg, from about 0.1 to about 4 mg, from about 0.1 to about 3, from about 0.1 to about 2 mg, from about 0.1 to about 1 mg, from about 0.1 to about 0.9 mg, from about 0.1 to about 0.8 mg, from about 0.1 to about 0.7 mg, from about 0.1 to about 0.6 mg, from about 0.1 to about 0.5 mg, from about 0.1 to about 0.4 mg, from about 0.1 to about 0.3, or from about 0.1 to about 0.2 mg.

[0110] In some embodiments, the method as described herein comprises administering to the human subject a pharmaceutical composition comprising the compound as described herein at a first dose of from 0.1 to 950 mg, from 0.1 to 900 mg, from 0.1 to 850 mg, from 0.1 to 800 mg, from 0.1 to 750 mg, from 0.1 to 700 mg, from 0.1 to 650 mg, from 0.1 to 600 mg, from 0.1 to 550 mg, from 0.1 to 500 mg, from 0.1 to 450 mg, from 0.1 to 400 mg, from 0.1 to 350 mg, from 0.1 to 300 mg, from 0.1 to 250 mg, from 0.1 to 200 mg, from 0.1 to 150 mg, from 0.1 to 100 mg, from 0.1 to 95 mg, from 0.1 to 90 mg, from 0.1 to 85 mg, from 0.1 to 80 mg, from 0.1 to 75 mg, from 0.1 to 70 mg, from 0.1 to 65 mg, from 0.1 to 60 mg, from 0.1 to 55 mg, from 0.1 to 50 mg, from 0.1 to 45 mg, from 0.1 to 40 mg, from 0.1 to 35 mg, from 0.1 to 30 mg, from 0.1 to mg, from 0.1 to 25 mg, from 0.1 to 20 mg, from 0.1 to 10 mg, from 0.1 to 9 mg, from 0.1 to 8 mg, from 0.1 to 7 mg, from 0.1 to 6 mg, from 0.1 to 5 mg, from 0.1 to 4 mg, from 0.1 to 3, from 0.1 to 2 mg, from 0.1 to 1 mg, from 0.1 to 0.9 mg, from 0.1 to 0.8 mg, from 0.1 to 0.7 mg, from 0.1 to 0.6 mg, from 0.1 to 0.5 mg, from 0.1 to 0.4 mg, from 0.1 to 0.3, or from 0.1 to 0.2 mg.

[0111] In some embodiments, the method as described herein comprises administering to the human subject a pharmaceutical composition comprising the compound as described herein at a first dose of from about 1 to about 400 mg, from about 2 to about 400 mg, from about 3 to about 400 mg, from about 4 to about 400 mg, from about 5 to about 400 mg, from about 6 to about 400 mg, from about 7 to about 400 mg, from about 8 to about 400 mg, from about 9 to about 400 mg, from about 10 to about 400 mg, from about 20 to about 400 mg, from about 30 to about 400 mg, from about 40 to about 400 mg, from about 50 to about 400 mg, from about 60 to about 400 mg, from about 70 to about 400 mg, from about 80 to about 400 mg, from about 90 to about 400 mg, from about 100 to about 400 mg, from about 110 to about 400 mg, from about 120 to about 400 mg, from about 130 to about 400 mg, from about 140 to about 400 mg, from about 150 to about 400 mg, from about 160 to about 400 mg, from about 170 to about 400 mg, from about 180 to about 400 mg, from about 190 to about 400 mg, from about 200 to about 400 mg, from about 210 to about 400 mg, from about 220 to about 400 mg, from about 230 to about 400 mg, from about 240 to about 400 mg, from about 250 to about 400 mg, from about 260 to about 400 mg, from about 270 to about 400 mg, from about 280 to about 400 mg, from about 290 to about 400 mg, from about 300 to about 400 mg, from about 310 to about 400 mg, from about 320 to about 400 mg, from about 330 to about 400 mg, from about 340 to about 400 mg, from about 350 to about 400 mg, from about 360 to about 400 mg, from about 370 to about 400 mg, from about 380 to about 400 mg, or from about 390 to about 400 mg.

[0112] In some embodiments, the method as described herein comprises administering to the human subject a pharmaceutical composition comprising the compound as described herein at a first dose of from 1 to 400 mg, from 2 to 400 mg, from 3 to 400 mg, from 4 to 400 mg, from 5 to 400 mg, from 6 to 400 mg, from 7 to 400 mg, from 8 to 400 mg, from 9 to 400 mg, from 10 to 400 mg, from 20 to 400 mg, from 30 to 400 mg, from 40 to 400 mg, from 50 to 400 mg, from 60 to 400 mg, from 70 to 400 mg, from 80 to 400 mg, from 90 to 400 mg, from 100 to 400 mg, from 110 to 400 mg, from 120 to 400 mg, from 130 to 400 mg, from about 140 to 400 mg, from 150 to 400 mg, from about 160 to 400 mg, from 170 to 400 mg, from 180 to 400 mg, from 190 to 400 mg, from 200 to 400 mg, from 210 to 400 mg, from 220 to 400 mg, from 230 to 400 mg, from 240 to 400 mg, from 250 to 400 mg, from 260 to 400 mg, from 270 to 400 mg, from 280 to 400 mg, from 290 to 400 mg, from 300 to 400 mg, from 310 to 400 mg, from 320 to 400 mg, from 330 to 400 mg, from 340 to 400 mg, from 350 to 400 mg, from 360 to 400 mg, from 370 to 400 mg, from 380 to 400 mg, or from 390 to 400 mg.

[0113] In some embodiments, the method as described herein comprises administering to the human subject a pharmaceutical composition comprising the compound as described herein at a first dose of from about 10 to about 390 mg, from about 10 to about 380 mg, from about 10 to about 370 mg, from about 10 to about 360 mg, from about 10 to about 350 mg, from about 10 to about 340 mg, from about 10 to about 330 mg, from about 10 to about 320 mg, from about 10 to about 310 mg, from about 10 to about 300 mg, from about 10 to about 290 mg, from about 10 to about 280 mg, from about 10 to about 270 mg, from about 10 to about 260 mg, from about 10 to about 250 mg, from about 10 to about 240 mg, from about 10 to about 230 mg, from about 10 to about 220 mg, from about 10 to about 210 mg, from about 10 to about 200 mg, from about 10 to about 190 mg, from about 10 to about 180 mg, from about 10 to about 170 mg, from about 10 to about 160 mg, from about 10 to about 150 mg, from about 10 to about 140 mg, from about 10 to about 130 mg, from about 10 to about 120 mg, from about 10 to about 110 mg, from about 10 to about 90 mg, from about 10 to about 80 mg, from about 10 to about 70 mg, from about 10 to about 60 mg, from about 10 to about 50 mg, from about 10 to about 40 mg, from about 10 to about 30 mg, or from about 10 to about 20 mg.

[0114] In some embodiments, the method as described herein comprises administering to the human subject a pharmaceutical composition comprising the compound as described herein at a first dose of from 10 to 390 mg, from 10 to 380 mg, from 10 to 370 mg, from 10 to 360 mg, from 10 to 350 mg, from 10 to 340 mg, from 10 to 330 mg, from 10 to 320 mg, from 10 to 310 mg, from 10 to 300 mg, from 10 to 290 mg, from 10 to 280 mg, from 10 to 270 mg, from 10 to 260 mg, from 10 to 250 mg, from 10 to 240 mg, from 10 to 230 mg, from 10 to 220 mg, from 10 to 210 mg, from 10 to 200 mg, from 10 to 190 mg, from 10 to 180 mg, from 10 to 170 mg, from 10 to 160 mg, from 10 to 150 mg, from 10 to 140 mg, from 10 to 130 mg, from 10 to 120 mg, from 10 to 110 mg, from 10 to 90 mg, from 10 to 80 mg, from 10 to 70 mg, from 10 to 60 mg, from 10 to 50 mg, from 10 to 40 mg, from 10 to 30 mg, or from 10 to 20 mg.

[0115] In some embodiments, the method as described herein comprises administering to the human subject a pharmaceutical composition comprising the compound as described herein at a first dose of about 1 mg, about 2 mg, about 3 mg, about 4 mg, about 5 mg, about 6 mg, about 7 mg, about 8 mg, about 9 mg, about 10 mg, about 11 mg, about 12 mg, about 13 mg, about 14 mg, about 15 mg, about 16 mg, about 17 mg, about 18 mg, about 19 mg, about 20 mg, about 21 mg, about 22 mg, about 23 mg, about 24 mg, about 25 mg, about 26 mg, about 27 mg, about 28 mg, about 29 mg, about 30 mg, about 31 mg, about 32 mg, about 33 mg, about 34 mg, about 35 mg, about 36 mg, about 37 mg, about 38 mg, about 39 mg, about 40 mg, about 41 mg, about 42 mg, about 43 mg, about 44 mg, about 45 mg, about 46 mg, about 47 mg, about 48 mg, about 49 mg, about 50 mg, about 51 mg, about 52 mg, about 53 mg, about 54 mg, about 55 mg, about 56 mg, about 57 mg, about 58 mg, about 59 mg, about 60 mg, about 61 mg, about 62 mg, about 63 mg, about 64 mg, about 65 mg, about 66 mg, about 67 mg, about 68 mg, about 69 mg, about 70 mg, about 71 mg, about 72 mg, about 73 mg, about 74 mg, about 75 mg, about 76 mg, about 77 mg, about 78 mg, about 79 mg, about 80 mg, about 81 mg, about 82 mg, about 83 mg, about 84 mg, about 85 mg, about 86 mg, about 87 mg, about 88 mg, about 89 mg, about 90 mg, about 91 mg, about 92 mg, about 93 mg, about 94 mg, about 95 mg, about 96 mg, about 97 mg, about 98 mg, about 99 mg, about 100 mg, about 101 mg, about 102 mg, about 103 mg, about 104 mg, about 105 mg, about 106 mg, about 107 mg, about 108 mg, about 109 mg, about 110 mg, about 111 mg, about 112 mg, about 113 mg, about 114 mg, about 115 mg, about 116 mg, about 117 mg, about 118 mg, about 119 mg, about 120 mg, about 121 mg, about 122 mg, about 123 mg, about 124 mg, about 125 mg, about 126 mg, about 127 mg, about 128 mg, about 129 mg, about 130 mg, about 131 mg, about 132 mg, about 133 mg, about 134 mg, about 135 mg, about 136 mg, about 137 mg, about 138 mg, about 139 mg, about 140 mg, about 141 mg, about 142 mg, about 143 mg, about 144 mg, about 145 mg, about 146 mg, about 147 mg, about 148 mg, about 149 mg, about 150 mg, about 151 mg, about 152 mg, about 153 mg, about 154 mg, about 155 mg, about 156 mg, about 157 mg, about 158 mg, about 159 mg, about 160 mg, about 161 mg, about 162 mg, about 163 mg, about 164 mg, about 165 mg, about 166 mg, about 167 mg, about 168 mg, about 169 mg, about 170 mg, about 171 mg, about 172 mg, about 173 mg, about 174 mg, about 175 mg, about 176 mg, about 177 mg, about 178 mg, about 179 mg, about 180 mg, about 181 mg, about 182 mg, about 183 mg, about 184 mg, about 185 mg, about 186 mg, about 187 mg, about 188 mg, about 189 mg, about 190 mg, about 191 mg, about 192 mg, about 193 mg, about 194 mg, about 195 mg, about 196 mg, about 197 mg, about 198 mg, about 199 mg, about 200 mg, about 201 mg, about 202 mg, about 203 mg, about 204 mg, about 205 mg, about 206 mg, about 207 mg, about 208 mg, about 209 mg, about 210 mg, about 211 mg, about 212 mg, about 213 mg, about 214 mg, about 215 mg, about 216 mg, about 217 mg, about 218 mg, about 219 mg, about 220 mg, about 221 mg, about 222 mg, about 223 mg, about 224 mg, about 225 mg, about 226 mg, about 227 mg, about 228 mg, about 229 mg, about 230 mg, about 231 mg, about 232 mg, about 233 mg, about 234 mg, about 235 mg, about 236 mg, about 237 mg, about 238 mg, about 239 mg, about 240 mg, about 241 mg, about 242 mg, about 243 mg, about 244 mg, about 245 mg, about 246 mg, about 247 mg, about 248 mg, about 249 mg, about 250 mg, about 251 mg, about 252 mg, about 253 mg, about 254 mg, about 255 mg, about 256 mg, about 257 mg, about 258 mg, about 259 mg, about 260 mg, about 261 mg, about 262 mg, about 263 mg, about 264 mg, about 265 mg, about 266 mg, about 267 mg, about 268 mg, about 269 mg, about 270 mg, about 271 mg, about 272 mg, about 273 mg, about 274 mg, about 275 mg, about 276 mg, about 277 mg, about 278 mg, about 279 mg, about 280 mg, about 281 mg, about 282 mg, about 283 mg, about 284 mg, about 285 mg, about 286 mg, about 287 mg, about 288 mg, about 289 mg, about 290 mg, about 291 mg, about 292 mg, about 293 mg, about 294 mg, about 295 mg, about 296 mg, about 297 mg, about 298 mg, about 299 mg, about 300 mg, about 301 mg, about 302 mg, about 303 mg, about 304 mg, about 305 mg, about 306 mg, about 307 mg, about 308 mg, about 309 mg, about 310 mg, about 311 mg, about 312 mg, about 313 mg, about 314 mg, about 315 mg, about 316 mg, about 317 mg, about 318 mg, about 319 mg, about 320 mg, about 321 mg, about 322 mg, about 323 mg, about 324 mg, about 325 mg, about 326 mg, about 327 mg, about 328 mg, about 329 mg, about 330 mg, about 331 mg, about 332 mg, about 333 mg, about 334 mg, about 335 mg, about 336 mg, about 337 mg, about 338 mg, about 339 mg, about 340 mg, about 341 mg, about 342 mg, about 343 mg, about 344 mg, about 345 mg, about 346 mg, about 347 mg, about 348 mg, about 349 mg, about 350 mg, about 351 mg, about 352 mg, about 353 mg, about 354 mg, about 355 mg, about 356 mg, about 357 mg, about 358 mg, about 359 mg, about 360 mg, about 361 mg, about 362 mg, about 363 mg, about 364 mg, about 365 mg, about 366 mg, about 367 mg, about 368 mg, about 369 mg, about 370 mg, about 371 mg, about 372 mg, about 373 mg, about 374 mg, about 375 mg, about 376 mg, about 377 mg, about 378 mg, about 379 mg, about 380 mg, about 381 mg, about 382 mg, about 383 mg, about 384 mg, about 385 mg, about 386 mg, about 387 mg, about 388 mg, about 389 mg, about 390 mg, about 391 mg, about 392 mg, about 393 mg, about 394 mg, about 395 mg, about 396 mg, about 397 mg, about 398 mg, about 399 mg, or 400 mg.

[0116] In some embodiments mg, the method as described herein comprises administering to the human subject a pharmaceutical composition comprising the compound as described herein at a first dose of 1 mg, 2 mg, 3 mg, 4 mg, 5 mg, 6 mg, 7 mg, 8 mg, 9 mg, 10 mg, 11 mg, 12 mg, 13 mg, 14 mg, 15 mg, 16 mg, 17 mg, 18 mg, 19 mg, 20 mg, 21 mg, 22 mg, 23 mg, 24 mg, 25 mg, 26 mg, 27 mg, 28 mg, 29 mg, 30 mg, 31 mg, 32 mg, 33 mg, 34 mg, 35 mg, 36 mg, 37 mg, 38 mg, 39 mg, 40 mg, 41 mg, 42 mg, 43 mg, 44 mg, 45 mg, 46 mg, 47 mg, 48 mg, 49 mg, 50 mg, 51 mg, 52 mg, 53 mg, 54 mg, 55 mg, 56 mg, 57 mg, 58 mg, 59 mg, 60 mg, 61 mg, 62 mg, 63 mg, 64 mg, 65 mg, 66 mg, 67 mg, 68 mg, 69 mg, 70 mg, 71 mg, 72 mg, 73 mg, 74 mg, 75 mg, 76 mg, 77 mg, 78 mg, 79 mg, 80 mg, 81 mg, 82 mg, 83 mg, 84 mg, 85 mg, 86 mg, 87 mg, 88 mg, 89 mg, 90 mg, 91 mg, 92 mg, 93 mg, 94 mg, 95 mg, 96 mg, 97 mg, 98 mg, 99 mg, 100 mg, 101 mg, 102 mg, 103 mg, 104 mg, 105 mg, 106 mg, 107 mg, 108 mg, 109 mg, 110 mg, 111 mg, 112 mg, 113 mg, 114 mg, 115 mg, 116 mg, 117 mg, 118 mg, 119 mg, 120 mg, 121 mg, 122 mg, 123 mg, 124 mg, 125 mg, 126 mg, 127 mg, 128 mg, 129 mg, 130 mg, 131 mg, 132 mg, 133 mg, 134 mg, 135 mg, 136 mg, 137 mg, 138 mg, 139 mg, 140 mg, 141 mg, 142 mg, 143 mg, 144 mg, 145 mg, 146 mg, 147 mg, 148 mg, 149 mg, 150 mg, 151 mg, 152 mg, 153 mg, 154 mg, 155 mg, 156 mg, 157 mg, 158 mg, 159 mg, 160 mg, 161 mg, 162 mg, 163 mg, 164 mg, 165 mg, 166 mg, 167 mg, 168 mg, 169 mg, 170 mg, 171 mg, 172 mg, 173 mg, 174 mg, 175 mg, 176 mg, 177 mg, 178 mg, 179 mg, 180 mg, 181 mg, 182 mg, 183 mg, 184 mg, 185 mg, 186 mg, 187 mg, 188 mg, 189 mg, 190 mg, 191 mg, 192 mg, 193 mg, 194 mg, 195 mg, 196 mg, 197 mg, 198 mg, 199 mg, 200 mg, 201 mg, 202 mg, 203 mg, 204 mg, 205 mg, 206 mg, 207 mg, 208 mg, 209 mg, 210 mg, 211 mg, 212 mg, 213 mg, 214 mg, 215 mg, 216 mg, 217 mg, 218 mg, 219 mg, 220 mg, 221 mg, 222 mg, 223 mg, 224 mg, 225 mg, 226 mg, 227 mg, 228 mg, 229 mg, 230 mg, 231 mg, 232 mg, 233 mg, 234 mg, 235 mg, 236 mg, 237 mg, 238 mg, 239 mg, 240 mg, 241 mg, 242 mg, 243 mg, 244 mg, 245 mg, 246 mg, 247 mg, 248 mg, 249 mg, 250 mg, 251 mg, 252 mg, 253 mg, 254 mg, 255 mg, 256 mg, 257 mg, 258 mg, 259 mg, 260 mg, 261 mg, 262 mg, 263 mg, 264 mg, 265 mg, 266 mg, 267 mg, 268 mg, 269 mg, 270 mg, 271 mg, 272 mg, 273 mg, 274 mg, 275 mg, 276 mg, 277 mg, 278 mg, 279 mg, 280 mg, 281 mg, 282 mg, 283 mg, 284 mg, 285 mg, 286 mg, 287 mg, 288 mg, 289 mg, 290 mg, 291 mg, 292 mg, 293 mg, 294 mg, 295 mg, 296 mg, 297 mg, 298 mg, 299 mg, 300 mg, 301 mg, 302 mg, 303 mg, 304 mg, 305 mg, 306 mg, 307 mg, 308 mg, 309 mg, 310 mg, 311 mg, 312 mg, 313 mg, 314 mg, 315 mg, 316 mg, 317 mg, 318 mg, 319 mg, 320 mg, 321 mg, 322 mg, 323 mg, 324 mg, 325 mg, 326 mg, 327 mg, 328 mg, 329 mg, 330 mg, 331 mg, 332 mg, 333 mg, 334 mg, 335 mg, 336 mg, 337 mg, 338 mg, 339 mg, 340 mg, 341 mg, 342 mg, 343 mg, 344 mg, 345 mg, 346 mg, 347 mg, 348 mg, 349 mg, 350 mg, 351 mg, 352 mg, 353 mg, 354 mg, 355 mg, 356 mg, 357 mg, 358 mg, 359 mg, 360 mg, 361 mg, 362 mg, 363 mg, 364 mg, 365 mg, 366 mg, 367 mg, 368 mg, 369 mg, 370 mg, 371 mg, 372 mg, 373 mg, 374 mg, 375 mg, 376 mg, 377 mg, 378 mg, 379 mg, 380 mg, 381 mg, 382 mg, 383 mg, 384 mg, 385 mg, 386 mg, 387 mg, 388 mg, 389 mg, 390 mg, 391 mg, 392 mg, 393 mg, 394 mg, 395 mg, 396 mg, 397 mg, 398 mg, 399 mg, or 400 mg.

### Therapeutic Target Population

[0117] In some embodiments, the human subject is at most 18 years old. In some embodiments, the human subject is from 1 to 18, from 2 to 18, from 3 to 18, from 4 to 18, from 5 to 18, from 6 to 18, from 7 to 18, from 8 to 18, from 9 to 18, from 10 to 18, from 11 to 18, from 12 to 18, from 13 to 18, from 14 to 18, from 15 to 18, from 16 to 18, or from 17 to 18 years old. In some embodiments, the human subject is a human from 1 to 17, from 1 to 16, from 1 to 15, from 1 to 14, from 1 to 13, from 1 to 12, from 1 to 11, from 1 to 10, from 1 to 9, from 1 to 8, from 1 to 7, from 1 to 6, from 1 to 5, from 1 to 4, from 1 to 3, or from 1 to 2 years old. In some embodiments, the human subject is less than a year old or 1, 2, 3, 4, 5, 6, 7, 8, 9, 10, 11, 12, 13, 14, 15, 16, 17, or 18 years old.

[0118] In some embodiments, the human subject is at most 35 years, 30 years, 29 years, 28 years, 27 years, 26 years, 25 years, 24 years, 23 years, 22 years, 21 years, 20 years, 19 years, 18 years, 17 years, 16 years, 15 years, 14 years, 13 years, 12 years, 11 years, 10 years, 9 years, 8 years, 7 years, 6 years, 5 years, 4 years, 3 years, 2 years, or 1 year old.

[0119] In some embodiments, the human subject is less than a year old or 1, 2, 3, 4, 5, 6, 7, 8, 9, 10, 11, 12, 13, 14, 15, 16, 17, 18, 19, 20, 21, 22, 23, 24, 25, 26, 27, 28, 29, 30, 31, 32, 33, 34, or 35 years old.

[0120] In some embodiments, the human subject is from 1 to 35, from 2 to 35, from 3 to 35, from 4 to 35, from 5 to 35, from 6 to 35, from 7 to 35, from 8 to 35, from 9 to 35, from 10 to 35, from 11 to 35, from 12 to 35, from 13 to 35, from 14 to 35, from 15 to 35, from 16 to 35, 17 to 35, from 18 to 35, from 19 to 35, from 20 to 35, from 21 to 35, from 22 to 35, from 23 to 35, from 24 to 35, from 25 to 35, from 26 to 35, from 27 to 35, from 28 to 35, from 29 to 35, from 30 to 35, from 31 to 35, from 32 to 35, from 33 to 35, or from 34 to 35 years old.

[0121] In some embodiments, the human subject is a human from 1 to 35, from 1 to 34, from 1 to 33, from 1 to 32, from 1 to 31, from 1 to 30, from 1 to 29, from 1 to 28, from 1 to 27, from 1 to 26, from 1 to 25, from 1 to 24, from 1 to 23, from 1 to 22, from 1 to 21, from 1 to 20, from 1 to 19, from 1 to 18, from 1 to 17, from 1 to 16, from 1 to 15, from 1 to 14, from 1 to 13, from 1 to 12, from 1 to 11, from 1 to 10, from 1 to 9, from 1 to 8, from 1 to 7, from 1 to 6, from 1 to 5, from 1 to 4, from 1 to 3, or from 1 to 2 years old.

[0122] In some embodiments, the human subject is a human from 2 to 35, from 2 to 34, from 2 to 33, from 2 to 32, from 2 to 31, from 2 to 30, from 2 to 29, from 2 to 28, from 2 to 27, from 2 to 26, from 2 to 25, from 2 to 24, from 2 to 23, from 2 to 22, from 2 to 21, from 2 to 20, from 2 to 19, from 2 to 18, from 2 to 17, from 2 to 16, from 2 to 15, from 2 to 14, from 2 to 13, from 2 to 12, from 2 to 11, from 2 to 10, from 2 to 9, from 2 to 8, from 2 to 7, from 2 to 6, from 2 to 5, from 2 to 4, or from 2 to 3 years old. In some embodiments, the human subject is a human from 3 to 35, from 3 to 34, from 3 to 33, from 3 to 32, from 3 to 31, from 3 to 30, from 3 to 29, from 3 to 28, from 3 to 27, from 3 to 26, from 3 to 25, from 3 to 24, from 3 to 23, from 3 to 22, from 3 to 21, from 3 to 20, from 3 to 19, from 3 to 18, from 3 to 17, from 3 to 16, from 3 to 15, from 3 to 14, from 3 to 13, from 3 to 12, from 3 to 11, from 3 to 10, from 3 to 9, from 3 to 8, from 3 to 7, from 3 to 6, from 3 to 5, or from 3 to 4 years old.

[0123] In some embodiments, the human subject is a human from 4 to 35, from 4 to 34, from 4 to 33, from 4 to 32, from 4 to 31, from 4 to 30, from 4 to 29, from 4 to 28, from 4 to 27, from 4 to 26, from 4 to 25, from 4 to 24, from 4 to 23, from 4 to 22, from 4 to 21, from 4 to 20, from 4 to 19, from 4 to 18, from 4 to 17, from 4 to 16, from 4 to 15, from 4 to 14, from 4 to 13, from 4 to 12, from 4 to 11, from 4 to 10, from 4 to 9, from 4 to 8, from 4 to 7, from 4 to 6, or from 4 to 5 years old.

[0124] In some embodiments, the human subject is a human from 5 to 35, from 5 to 34, from 5 to 33, from 5 to 32, from 5 to 31, from 5 to 30, from 5 to 29, from 5 to 28, from 5 to 27, from 5 to 26, from 5 to 25, from 5 to 24, from 5 to 23, from 5 to 22, from 5 to 21, from 5 to 20, from 5 to 19, from 5 to 18, from 5 to 17, from 5 to 16, from 5 to 15, from 5 to 14, from 5 to 13, from 5 to 12, from 5 to 11, from 5 to 10, from 5 to 9, from 5 to 8, from 5 to 7, or from 5 to 6 years old.

[0125] In some embodiments, the human subject is a human from 6 to 35, from 6 to 34, from 6 to 33, from 6 to 32, from 6 to 31, from 6 to 30, from 6 to 29, from 6 to 28, from 6 to 27, from 6 to 26, from 6 to 25, from 6 to 24, from 6 to 23, from 6 to 22, from 6 to 21, from 6 to 20, from 6 to 19, from 6 to 18, from 6 to 17, from 6 to 16, from 6 to 15, from 6 to 14, from 6 to 13, from 6 to 12, from 6 to 11, from 6 to 10, from 6 to 9, from 6 to 8, or from 6 to 7 years old.

[0126] In some embodiments, the human subject is a human from 7 to 35, from 7 to 34, from 7 to 33, from 7 to 32, from 7 to 31, from 7 to 30, from 7 to 29, from 7 to 28, from 7 to 27, from 7 to 26, from 7 to 25, from 7 to 24, from 7 to 23, from 7 to 22, from 7 to 21, from 7 to 20, from 7 to 19, from 7 to 18, from 7 to 17, from 7 to 16, from 7 to 15, from 7 to 14, from 7 to 13, from 7 to 12, from 7 to 11, from 7 to 10, from 7 to 9, from 7 to 8 years old.

[0127] In some embodiments, the human subject is a human from 8 to 35, from 8 to 34, from 8 to 33, from 8 to 32, from 8 to 31, from 8 to 30, from 8 to 29, from 8 to 28, from 8 to 27, from 8 to 26, from 8 to 25, from 8 to 24, from 8 to 23, from 8 to 22, from 8 to 21, from 8 to 20, from 8 to 19, from 8 to 18, from 8 to 17, from 8 to 16, from 8 to 15, from 8 to 14, from 8 to 13, from 8 to 12, from 8 to 11, from 8 to 10, or from 8 to 9 years old.

[0128] In some embodiments, the human subject is characterized by having: (i) seizure onset prior to 12 months of age with recurrent focal motor or hemiconvulsive or generalized tonic-clonic seizures, which are often prolonged and triggered by hyperthermia; (ii) no past history of causal magnetic resonance imaging lesion; (iii) no other known etiology of any diseases or conditions except Dravet Syndrome; (iv) normal development at seizure onset; (v) a pathogenic variant, or variant of uncertain significance in an SCN1A gene; (vi) at least 2 prior treatments for epilepsy that either had lack of adequate seizure control; (vii) 4 or more convulsive seizures during the 28 days prior to administering, wherein the convulsive seizures is any one selected from Hemiclonic, Focal with Motor Signs, Focal to Bilateral Tonic Clonic Convulsion, Generalized Tonic Clonic Convulsion, Tonic, Tonic or Atonic (Drop Attacks), and Clonic; (viii) a current intervention for epilepsy or medication with at least one antiepileptic drug at a dose which has been stable for at least 4 weeks, wherein the interventions for epilepsy is a ketogenic diet, a vagal nerve stimulator, or a cannabinoid or marijuana-derived product; or (ix) any combination of (i)-(viii).

[0129] In some embodiments, the human subject is characterized by having at least one or more of: (i) seizure onset prior to 12 months of age with recurrent focal motor or hemiconvulsive or generalized tonic-clonic seizures, which are often prolonged and triggered by hyperthermia; (ii) no past history of causal magnetic resonance imaging lesion; (iii) no other known etiology of any diseases or conditions except Dravet Syndrome; (iv) normal development at seizure onset; (v) a pathogenic variant, or variant of uncertain significance in an SCN1A gene; (vi) at least 2 prior treatments for epilepsy that either had lack of adequate seizure control; (vii) 4 or more convulsive seizures during the 28 days prior to administering, wherein the convulsive seizures is any one selected from Hemiclonic, Focal with Motor Signs, Focal to Bilateral Tonic Clonic Convulsion, Generalized Tonic Clonic Convulsion, Tonic, Tonic or Atonic (Drop Attacks), and Clonic; and (viii) a current intervention for epilepsy or medication with at least one antiepileptic drug at a dose which has been stable for at least 4 weeks, wherein the interventions for epilepsy is a ketogenic diet, a vagal nerve stimulator, or a cannabinoid or marijuana-derived product. In some embodiments, the human subject is characterized by having at least two or more of: (i) seizure onset prior to 12 months of age with recurrent focal motor or hemiconvulsive or generalized tonic-clonic seizures, which are often prolonged and triggered by hyperthermia; (ii) no past history of causal magnetic resonance imaging lesion; (iii) no other known etiology of any diseases or conditions except Dravet Syndrome; (iv) normal development at seizure onset; (v) a pathogenic variant, or variant of uncertain significance in an SCN1A gene; (vi) at least 2 prior treatments for epilepsy that either had lack of adequate seizure control; (vii) 4 or more convulsive seizures during the 28 days prior to administering, wherein the convulsive seizures is any one selected from Hemiclonic, Focal with Motor Signs, Focal to Bilateral Tonic Clonic Convulsion, Generalized Tonic Clonic Convulsion, Tonic, Tonic or Atonic (Drop Attacks), and Clonic; and (viii) a current intervention for epilepsy or medication with at least one antiepileptic drug at a dose which has been stable for at least 4 weeks, wherein the interventions for epilepsy is a ketogenic diet, a vagal nerve stimulator, or a cannabinoid or marijuana-derived product. In some embodiments, the human subject is characterized by having at least three or more of: (i) seizure onset prior to 12 months of age with recurrent focal motor or hemiconvulsive or generalized tonic-clonic seizures, which are often prolonged and triggered by hyperthermia; (ii) no past history of causal magnetic resonance imaging lesion; (iii) no other known etiology of any diseases or conditions except Dravet Syndrome; (iv) normal development at seizure onset; (v) a pathogenic variant, or variant of uncertain significance in an SCN1A gene; (vi) at least 2 prior treatments for epilepsy that either had lack of adequate seizure control; (vii) 4 or more convulsive seizures during the 28 days prior to administering, wherein the convulsive seizures is any one selected from Hemiclonic, Focal with Motor Signs, Focal to Bilateral Tonic Clonic Convulsion, Generalized Tonic Clonic Convulsion, Tonic, Tonic or Atonic (Drop Attacks), and Clonic; and (viii) a current intervention for epilepsy or medication with at least one antiepileptic drug at a dose which has been stable for at least 4 weeks, wherein the interventions for epilepsy is a ketogenic diet, a vagal nerve stimulator, or a cannabinoid or marijuana-derived product. In some embodiments, the human subject is characterized by having at least four or more of: (i) seizure onset prior to 12 months of age with recurrent focal motor or hemiconvulsive or generalized tonic-clonic seizures, which are often prolonged and triggered by hyperthermia; (ii) no past history of causal magnetic resonance imaging lesion; (iii) no other known etiology of any diseases or conditions except Dravet Syndrome; (iv) normal development at seizure onset; (v) a pathogenic variant, or variant of uncertain significance in an SCN1A gene; (vi) at least 2 prior treatments for epilepsy that either had lack of adequate seizure control; (vii) 4 or more convulsive seizures during the 28 days prior to administering, wherein the convulsive seizures is any one selected from Hemiclonic, Focal with Motor Signs, Focal to Bilateral Tonic Clonic Convulsion, Generalized Tonic Clonic Convulsion, Tonic, Tonic or Atonic (Drop Attacks), and Clonic; and (viii) a current intervention for epilepsy or medication with at least one antiepileptic drug at a dose which has been stable for at least 4 weeks, wherein the interventions for epilepsy is a ketogenic diet, a vagal nerve stimulator, or a cannabinoid or marijuana-derived product. In some embodiments, the human subject is characterized by having at least five or more of: (i) seizure onset prior to 12 months of age with recurrent focal motor or hemiconvulsive or generalized tonic-clonic seizures, which are often prolonged and triggered by hyperthermia; (ii) no past history of causal magnetic resonance imaging lesion; (iii) no other known etiology of any diseases or conditions except Dravet Syndrome; (iv) normal development at seizure onset; (v) a pathogenic variant, or variant of uncertain significance in an SCN1A gene; (vi) at least 2 prior treatments for epilepsy that either had lack of adequate seizure control; (vii) 4 or more convulsive seizures during the 28 days prior to administering, wherein the convulsive seizures is any one selected from Hemiclonic, Focal with Motor Signs, Focal to Bilateral Tonic Clonic Convulsion, Generalized Tonic Clonic Convulsion, Tonic, Tonic or Atonic (Drop Attacks), and Clonic; and (viii) a current intervention for epilepsy or medication with at least one antiepileptic drug at a dose which has been stable for at least 4 weeks, wherein the interventions for epilepsy is a ketogenic diet, a vagal nerve stimulator, or a cannabinoid or marijuana-derived product. In some embodiments, the human subject is characterized by having at least six or more of: (i) seizure onset prior to 12 months of age with recurrent focal motor or hemiconvulsive or generalized tonic-clonic seizures, which are often prolonged and triggered by hyperthermia; (ii) no past history of causal magnetic resonance imaging lesion; (iii) no other known etiology of any diseases or conditions except Dravet Syndrome; (iv) normal development at seizure onset; (v) a pathogenic variant, or variant of uncertain significance in an SCN1A gene; (vi) at least 2 prior treatments for epilepsy that either had lack of adequate seizure control; (vii) 4 or more convulsive seizures during the 28 days prior to administering, wherein the convulsive seizures is any one selected from Hemiclonic, Focal with Motor Signs, Focal to Bilateral Tonic Clonic Convulsion, Generalized Tonic Clonic Convulsion, Tonic, Tonic or Atonic (Drop Attacks), and Clonic; and (viii) a current intervention for epilepsy or medication with at least one antiepileptic drug at a dose which has been stable for at least 4 weeks, wherein the interventions for epilepsy is a ketogenic diet, a vagal nerve stimulator, or a cannabinoid or marijuana-derived product. In some embodiments, the human subject is characterized by having at least seven or more of: (i) seizure onset prior to 12 months of age with recurrent focal motor or hemiconvulsive or generalized tonic-clonic seizures, which are often prolonged and triggered by hyperthermia; (ii) no past history of causal magnetic resonance imaging lesion; (iii) no other known etiology of any diseases or conditions except Dravet Syndrome; (iv) normal development at seizure onset; (v) a pathogenic variant, or variant of uncertain significance in an SCN1A gene; (vi) at least 2 prior treatments for epilepsy that either had lack of adequate seizure control; (vii) 4 or more convulsive seizures during the 28 days prior to administering, wherein the convulsive seizures is any one selected from Hemiclonic, Focal with Motor Signs, Focal to Bilateral Tonic Clonic Convulsion, Generalized Tonic Clonic Convulsion, Tonic, Tonic or Atonic (Drop Attacks), and Clonic; and (viii) a current intervention for epilepsy or medication with at least one antiepileptic drug at a dose which has been stable for at least 4 weeks, wherein the interventions for epilepsy is a ketogenic diet, a vagal nerve stimulator, or a cannabinoid or marijuana-derived product. In some embodiments, the human subject is characterized by having all eight of: (i) seizure onset prior to 12 months of age with recurrent focal motor or hemiconvulsive or generalized tonic-clonic seizures, which are often prolonged and triggered by hyperthermia; (ii) no past history of causal magnetic resonance imaging lesion; (iii) no other known etiology of any diseases or conditions except Dravet Syndrome; (iv) normal development at seizure onset; (v) a pathogenic variant, or variant of uncertain significance in an SCN1A gene; (vi) at least 2 prior treatments for epilepsy that either had lack of adequate seizure control; (vii) 4 or more convulsive seizures during the 28 days prior to administering, wherein the convulsive seizures is any one selected from Hemiclonic, Focal with Motor Signs, Focal to Bilateral Tonic Clonic Convulsion, Generalized Tonic Clonic Convulsion, Tonic, Tonic or Atonic (Drop Attacks), and Clonic; and (viii) a current intervention for epilepsy or medication with at least one antiepileptic drug at a dose which has been stable for at least 4 weeks, wherein the interventions for epilepsy is a ketogenic diet, a vagal nerve stimulator, or a cannabinoid or marijuana-derived product.

[0130] In some embodiments, the human subject is additionally characterized by not having one or more of the following: (a) one of the following mutations in the SCN1A gene: Thr226Met, Leu263Val, Val422Leu, Thr1174Ser, Trp1204Arg, Pro1345Ser, Gln1489Lys, Phe1499Leu, Arg1575Cys, Val1611Phe, Leu1624Pro, Arg1648Cys, Leu1649Gln, Leu1670Trp, Gly1674Arg, and Asp1866Tyr; (b) a known pathogenic mutation in another gene that causes epilepsy, wherein the pathogenic mutation is homozygous in cases of known recessive disease; (c) currently treated with a sodium channel blocker as maintenance treatment and an anticoagulant, wherein the sodium channel blocker is phenytoin, carbamazepine, oxcarbazepine, lamotrigine, lacosamide, or rufinamide, and wherein the anticoagulant is not an aspirin; (d) clinically, significantly unstable medical conditions other than epilepsy; (e) clinically, relevant symptoms or a clinically significant illness in the 4 weeks prior to administering, other than epilepsy; (f) a history of brain or spinal cord disease other than epilepsy or Dravet Syndrome; or a history of bacterial meningitis or brain malformation; (g) a spinal deformity or other condition that alters the free flow of cerebrospinal fluid (CSF) or having an implanted CSF drainage shunt; (h) clinically significant abnormal laboratory values prior to administering; (i) aspartate aminotransferase or alanine aminotransferase >2.5-fold upper limit of normal, serum creatinine >upper limit of normal or platelet count <lower limit of normal; (j) clinically relevant abnormalities in the 12-lead electrocardiogram (ECG) measured at prior to administering; (k) a psychiatric or behavioral disorder; (l) currently or in the past 4 weeks, medication of an anticoagulant, wherein the anticoagulant is not aspirin; or (m) any combination of (a)-(l). In some embodiments, the human subject is characterized by not having one or more of the following: (a) one of the following mutations in the SCN1A gene: Thr226Met, Leu263Val, Val422Leu, Thr1174Ser, Trp1204Arg, Pro1345Ser, Gln1489Lys, Phe1499Leu, Arg1575Cys, Val1611Phe, Leu1624Pro, Arg1648Cys, Leu1649Gln, Leu1670Trp, Gly1674Arg, and Asp1866Tyr; (b) a known pathogenic mutation in another gene that causes epilepsy, wherein the pathogenic mutation is homozygous in cases of known recessive disease; (c) currently treated with a sodium channel blocker as maintenance treatment and an anticoagulant, wherein the sodium channel blocker is phenytoin, carbamazepine, oxcarbazepine, lamotrigine, lacosamide, or rufinamide, and wherein the anticoagulant is not an aspirin; (d) clinically, significantly unstable medical conditions other than epilepsy; (e) clinically, relevant symptoms or a clinically significant illness in the 4 weeks prior to administering, other than epilepsy; (f) a history of brain or spinal cord disease other than epilepsy or Dravet Syndrome; or a history of bacterial meningitis or brain malformation; (g) a spinal deformity or other condition that alters the free flow of cerebrospinal fluid (CSF) or having an implanted CSF drainage shunt; (h) clinically significant abnormal laboratory values prior to administering; (i) aspartate aminotransferase or alanine aminotransferase >2.5-fold upper limit of normal, serum creatinine >upper limit of normal or platelet count <lower limit of normal; (j) clinically relevant abnormalities in the 12-lead electrocardiogram (ECG) measured at prior to administering; (k) a psychiatric or behavioral disorder; and (l) currently or in the past 4 weeks, medication of an anticoagulant, wherein the anticoagulant is not aspirin. In some embodiments, the human subject is additionally characterized by not having two or more of the following: (a) one of the following mutations in the SCN1A gene: Thr226Met, Leu263Val, Val422Leu, Thr1174Ser, Trp1204Arg, Pro1345Ser, Gln1489Lys, Phe1499Leu, Arg1575Cys, Val1611Phe, Leu1624Pro, Arg1648Cys, Leu1649Gln, Leu1670Trp, Gly1674Arg, and Asp1866Tyr; (b) a known pathogenic mutation in another gene that causes epilepsy, wherein the pathogenic mutation is homozygous in cases of known recessive disease; (c) currently treated with a sodium channel blocker as maintenance treatment and an anticoagulant, wherein the sodium channel blocker is phenytoin, carbamazepine, oxcarbazepine, lamotrigine, lacosamide, or rufinamide, and wherein the anticoagulant is not an aspirin; (d) clinically, significantly unstable medical conditions other than epilepsy; (e) clinically, relevant symptoms or a clinically significant illness in the 4 weeks prior to administering, other than epilepsy; (f) a history of brain or spinal cord disease other than epilepsy or Dravet Syndrome; or a history of bacterial meningitis or brain malformation; (g) a spinal deformity or other condition that alters the free flow of cerebrospinal fluid (CSF) or having an implanted CSF drainage shunt; (h) clinically significant abnormal laboratory values prior to administering; (i) aspartate aminotransferase or alanine aminotransferase >2.5-fold upper limit of normal, serum creatinine >upper limit of normal or platelet count <lower limit of normal; (j) clinically relevant abnormalities in the 12-lead electrocardiogram (ECG) measured at prior to administering; (k) a psychiatric or behavioral disorder; and (l) currently or in the past 4 weeks, medication of an anticoagulant, wherein the anticoagulant is not aspirin. In some embodiments, the human subject is additionally characterized by not having three or more of the following: (a) one of the following mutations in the SCN1A gene: Thr226Met, Leu263Val, Val422Leu, Thr1174Ser, Trp1204Arg, Pro1345Ser, Gln1489Lys, Phe1499Leu, Arg1575Cys, Val1611Phe, Leu1624Pro, Arg1648Cys, Leu1649Gln, Leu1670Trp, Gly1674Arg, and Asp1866Tyr; (b) a known pathogenic mutation in another gene that causes epilepsy, wherein the pathogenic mutation is homozygous in cases of known recessive disease; (c) currently treated with a sodium channel blocker as maintenance treatment and an anticoagulant, wherein the sodium channel blocker is phenytoin, carbamazepine, oxcarbazepine, lamotrigine, lacosamide, or rufinamide, and wherein the anticoagulant is not an aspirin; (d) clinically, significantly unstable medical conditions other than epilepsy; (e) clinically, relevant symptoms or a clinically significant illness in the 4 weeks prior to administering, other than epilepsy; (f) a history of brain or spinal cord disease other than epilepsy or Dravet Syndrome; or a history of bacterial meningitis or brain malformation; (g) a spinal deformity or other condition that alters the free flow of cerebrospinal fluid (CSF) or having an implanted CSF drainage shunt; (h) clinically significant abnormal laboratory values prior to administering; (i) aspartate aminotransferase or alanine aminotransferase >2.5-fold upper limit of normal, serum creatinine >upper limit of normal or platelet count <lower limit of normal; (j) clinically relevant abnormalities in the 12-lead electrocardiogram (ECG) measured at prior to administering; (k) a psychiatric or behavioral disorder; and (l) currently or in the past 4 weeks, medication of an anticoagulant, wherein the anticoagulant is not aspirin. In some embodiments, the human subject is additionally characterized by not having four or more of the following: (a) one of the following mutations in the SCN1A gene: Thr226Met, Leu263Val, Val422Leu, Thr1174Ser, Trp1204Arg, Pro1345Ser, Gln1489Lys, Phe1499Leu, Arg1575Cys, Val1611Phe, Leu1624Pro, Arg1648Cys, Leu1649Gln, Leu1670Trp, Gly1674Arg, and Asp1866Tyr; (b) a known pathogenic mutation in another gene that causes epilepsy, wherein the pathogenic mutation is homozygous in cases of known recessive disease; (c) currently treated with a sodium channel blocker as maintenance treatment and an anticoagulant, wherein the sodium channel blocker is phenytoin, carbamazepine, oxcarbazepine, lamotrigine, lacosamide, or rufinamide, and wherein the anticoagulant is not an aspirin; (d) clinically, significantly unstable medical conditions other than epilepsy; (e) clinically, relevant symptoms or a clinically significant illness in the 4 weeks prior to administering, other than epilepsy; (f) a history of brain or spinal cord disease other than epilepsy or Dravet Syndrome; or a history of bacterial meningitis or brain malformation; (g) a spinal deformity or other condition that alters the free flow of cerebrospinal fluid (CSF) or having an implanted CSF drainage shunt; (h) clinically significant abnormal laboratory values prior to administering; (i) aspartate aminotransferase or alanine aminotransferase >2.5-fold upper limit of normal, serum creatinine >upper limit of normal or platelet count <lower limit of normal; (j) clinically relevant abnormalities in the 12-lead electrocardiogram (ECG) measured at prior to administering; (k) a psychiatric or behavioral disorder; and (l) currently or in the past 4 weeks, medication of an anticoagulant, wherein the anticoagulant is not aspirin. In some embodiments, the human subject is additionally characterized by not having five or more of the following: (a) one of the following mutations in the SCN1A gene: Thr226Met, Leu263Val, Val422Leu, Thr1174Ser, Trp1204Arg, Pro1345Ser, Gln1489Lys, Phe1499Leu, Arg1575Cys, Val1611Phe, Leu1624Pro, Arg1648Cys, Leu1649Gln, Leu1670Trp, Gly1674Arg, and Asp1866Tyr; (b) a known pathogenic mutation in another gene that causes epilepsy, wherein the pathogenic mutation is homozygous in cases of known recessive disease; (c) currently treated with a sodium channel blocker as maintenance treatment and an anticoagulant, wherein the sodium channel blocker is phenytoin, carbamazepine, oxcarbazepine, lamotrigine, lacosamide, or rufinamide, and wherein the anticoagulant is not an aspirin; (d) clinically, significantly unstable medical conditions other than epilepsy; (e) clinically, relevant symptoms or a clinically significant illness in the 4 weeks prior to administering, other than epilepsy; (f) a history of brain or spinal cord disease other than epilepsy or Dravet Syndrome; or a history of bacterial meningitis or brain malformation; (g) a spinal deformity or other condition that alters the free flow of cerebrospinal fluid (CSF) or having an implanted CSF drainage shunt; (h) clinically significant abnormal laboratory values prior to administering; (i) aspartate aminotransferase or alanine aminotransferase >2.5-fold upper limit of normal, serum creatinine >upper limit of normal or platelet count <lower limit of normal; (j) clinically relevant abnormalities in the 12-lead electrocardiogram (ECG) measured at prior to administering; (k) a psychiatric or behavioral disorder; and (l) currently or in the past 4 weeks, medication of an anticoagulant, wherein the anticoagulant is not aspirin. In some embodiments, the human subject is additionally characterized by not having six or more of the following: (a) one of the following mutations in the SCN1A gene: Thr226Met, Leu263Val, Val422Leu, Thr1174Ser, Trp1204Arg, Pro1345Ser, Gln1489Lys, Phe1499Leu, Arg1575Cys, Val1611Phe, Leu1624Pro, Arg1648Cys, Leu1649Gln, Leu1670Trp, Gly1674Arg, and Asp1866Tyr; (b) a known pathogenic mutation in another gene that causes epilepsy, wherein the pathogenic mutation is homozygous in cases of known recessive disease; (c) currently treated with a sodium channel blocker as maintenance treatment and an anticoagulant, wherein the sodium channel blocker is phenytoin, carbamazepine, oxcarbazepine, lamotrigine, lacosamide, or rufinamide, and wherein the anticoagulant is not an aspirin; (d) clinically, significantly unstable medical conditions other than epilepsy; (e) clinically, relevant symptoms or a clinically significant illness in the 4 weeks prior to administering, other than epilepsy; (f) a history of brain or spinal cord disease other than epilepsy or Dravet Syndrome; or a history of bacterial meningitis or brain malformation; (g) a spinal deformity or other condition that alters the free flow of cerebrospinal fluid (CSF) or having an implanted CSF drainage shunt; (h) clinically significant abnormal laboratory values prior to administering; (i) aspartate aminotransferase or alanine aminotransferase >2.5-fold upper limit of normal, serum creatinine >upper limit of normal or platelet count <lower limit of normal; (j) clinically relevant abnormalities in the 12-lead electrocardiogram (ECG) measured at prior to administering; (k) a psychiatric or behavioral disorder; and (l) currently or in the past 4 weeks, medication of an anticoagulant, wherein the anticoagulant is not aspirin. In some embodiments, the human subject is additionally characterized by not having seven or more of the following: (a) one of the following mutations in the SCN1A gene: Thr226Met, Leu263Val, Val422Leu, Thr1174Ser, Trp1204Arg, Pro1345Ser, Gln1489Lys, Phe1499Leu, Arg1575Cys, Val1611Phe, Leu1624Pro, Arg1648Cys, Leu1649Gln, Leu1670Trp, Gly1674Arg, and Asp1866Tyr; (b) a known pathogenic mutation in another gene that causes epilepsy, wherein the pathogenic mutation is homozygous in cases of known recessive disease; (c) currently treated with a sodium channel blocker as maintenance treatment and an anticoagulant, wherein the sodium channel blocker is phenytoin, carbamazepine, oxcarbazepine, lamotrigine, lacosamide, or rufinamide, and wherein the anticoagulant is not an aspirin; (d) clinically, significantly unstable medical conditions other than epilepsy; (e) clinically, relevant symptoms or a clinically significant illness in the 4 weeks prior to administering, other than epilepsy; (f) a history of brain or spinal cord disease other than epilepsy or Dravet Syndrome; or a history of bacterial meningitis or brain malformation; (g) a spinal deformity or other condition that alters the free flow of cerebrospinal fluid (CSF) or having an implanted CSF drainage shunt; (h) clinically significant abnormal laboratory values prior to administering; (i) aspartate aminotransferase or alanine aminotransferase >2.5-fold upper limit of normal, serum creatinine >upper limit of normal or platelet count <lower limit of normal; (j) clinically relevant abnormalities in the 12-lead electrocardiogram (ECG) measured at prior to administering; (k) a psychiatric or behavioral disorder; and (l) currently or in the past 4 weeks, medication of an anticoagulant, wherein the anticoagulant is not aspirin. In some embodiments, the human subject is additionally characterized by not having eight or more of the following: (a) one of the following mutations in the SCN1A gene: Thr226Met, Leu263Val, Val422Leu, Thr1174Ser, Trp1204Arg, Pro1345Ser, Gln1489Lys, Phe1499Leu, Arg1575Cys, Val1611Phe, Leu1624Pro, Arg1648Cys, Leu1649Gln, Leu1670Trp, Gly1674Arg, and Asp1866Tyr; (b) a known pathogenic mutation in another gene that causes epilepsy, wherein the pathogenic mutation is homozygous in cases of known recessive disease; (c) currently treated with a sodium channel blocker as maintenance treatment and an anticoagulant, wherein the sodium channel blocker is phenytoin, carbamazepine, oxcarbazepine, lamotrigine, lacosamide, or rufinamide, and wherein the anticoagulant is not an aspirin; (d) clinically, significantly unstable medical conditions other than epilepsy; (e) clinically, relevant symptoms or a clinically significant illness in the 4 weeks prior to administering, other than epilepsy; (f) a history of brain or spinal cord disease other than epilepsy or Dravet Syndrome; or a history of bacterial meningitis or brain malformation; (g) a spinal deformity or other condition that alters the free flow of cerebrospinal fluid (CSF) or having an implanted CSF drainage shunt; (h) clinically significant abnormal laboratory values prior to administering; (i) aspartate aminotransferase or alanine aminotransferase >2.5-fold upper limit of normal, serum creatinine >upper limit of normal or platelet count <lower limit of normal; (j) clinically relevant abnormalities in the 12-lead electrocardiogram (ECG) measured at prior to administering; (k) a psychiatric or behavioral disorder; and (l) currently or in the past 4 weeks, medication of an anticoagulant, wherein the anticoagulant is not aspirin. In some embodiments, the human subject is additionally characterized by not having nine or more of the following: (a) one of the following mutations in the SCN1A gene: Thr226Met, Leu263Val, Val422Leu, Thr1174Ser, Trp1204Arg, Pro1345Ser, Gln1489Lys, Phe1499Leu, Arg1575Cys, Val1611Phe, Leu1624Pro, Arg1648Cys, Leu1649Gln, Leu1670Trp, Gly1674Arg, and Asp1866Tyr; (b) a known pathogenic mutation in another gene that causes epilepsy, wherein the pathogenic mutation is homozygous in cases of known recessive disease; (c) currently treated with a sodium channel blocker as maintenance treatment and an anticoagulant, wherein the sodium channel blocker is phenytoin, carbamazepine, oxcarbazepine, lamotrigine, lacosamide, or rufinamide, and wherein the anticoagulant is not an aspirin; (d) clinically, significantly unstable medical conditions other than epilepsy; (e) clinically, relevant symptoms or a clinically significant illness in the 4 weeks prior to administering, other than epilepsy; (f) a history of brain or spinal cord disease other than epilepsy or Dravet Syndrome; or a history of bacterial meningitis or brain malformation; (g) a spinal deformity or other condition that alters the free flow of cerebrospinal fluid (CSF) or having an implanted CSF drainage shunt; (h) clinically significant abnormal laboratory values prior to administering; (i) aspartate aminotransferase or alanine aminotransferase >2.5-fold upper limit of normal, serum creatinine >upper limit of normal or platelet count <lower limit of normal; (j) clinically relevant abnormalities in the 12-lead electrocardiogram (ECG) measured at prior to administering; (k) a psychiatric or behavioral disorder; and (l) currently or in the past 4 weeks, medication of an anticoagulant, wherein the anticoagulant is not aspirin. In some embodiments, the human subject is additionally characterized by not having ten or more of the following: (a) one of the following mutations in the SCN1A gene: Thr226Met, Leu263Val, Val422Leu, Thr1174Ser, Trp1204Arg, Pro1345Ser, Gln1489Lys, Phe1499Leu, Arg1575Cys, Val1611Phe, Leu1624Pro, Arg1648Cys, Leu1649Gln, Leu1670Trp, Gly1674Arg, and Asp1866Tyr; (b) a known pathogenic mutation in another gene that causes epilepsy, wherein the pathogenic mutation is homozygous in cases of known recessive disease; (c) currently treated with a sodium channel blocker as maintenance treatment and an anticoagulant, wherein the sodium channel blocker is phenytoin, carbamazepine, oxcarbazepine, lamotrigine, lacosamide, or rufinamide, and wherein the anticoagulant is not an aspirin; (d) clinically, significantly unstable medical conditions other than epilepsy; (e) clinically, relevant symptoms or a clinically significant illness in the 4 weeks prior to administering, other than epilepsy; (f) a history of brain or spinal cord disease other than epilepsy or Dravet Syndrome; or a history of bacterial meningitis or brain malformation; (g) a spinal deformity or other condition that alters the free flow of cerebrospinal fluid (CSF) or having an implanted CSF drainage shunt; (h) clinically significant abnormal laboratory values prior to administering; (i) aspartate aminotransferase or alanine aminotransferase >2.5-fold upper limit of normal, serum creatinine >upper limit of normal or platelet count <lower limit of normal; (j) clinically relevant abnormalities in the 12-lead electrocardiogram (ECG) measured at prior to administering; (k) a psychiatric or behavioral disorder; and (l) currently or in the past 4 weeks, medication of an anticoagulant, wherein the anticoagulant is not aspirin. In some embodiments, the human subject is additionally characterized by not having eleven or more of the following: (a) one of the following mutations in the SCN1A gene: Thr226Met, Leu263Val, Val422Leu, Thr1174Ser, Trp1204Arg, Pro1345Ser, Gln1489Lys, Phe1499Leu, Arg1575Cys, Val1611Phe, Leu1624Pro, Arg1648Cys, Leu1649Gln, Leu1670Trp, Gly1674Arg, and Asp1866Tyr; (b) a known pathogenic mutation in another gene that causes epilepsy, wherein the pathogenic mutation is homozygous in cases of known recessive disease; (c) currently treated with a sodium channel blocker as maintenance treatment and an anticoagulant, wherein the sodium channel blocker is phenytoin, carbamazepine, oxcarbazepine, lamotrigine, lacosamide, or rufinamide, and wherein the anticoagulant is not an aspirin; (d) clinically, significantly unstable medical conditions other than epilepsy; (e) clinically, relevant symptoms or a clinically significant illness in the 4 weeks prior to administering, other than epilepsy; (f) a history of brain or spinal cord disease other than epilepsy or Dravet Syndrome; or a history of bacterial meningitis or brain malformation; (g) a spinal deformity or other condition that alters the free flow of cerebrospinal fluid (CSF) or having an implanted CSF drainage shunt; (h) clinically significant abnormal laboratory values prior to administering; (i) aspartate aminotransferase or alanine aminotransferase >2.5-fold upper limit of normal, serum creatinine >upper limit of normal or platelet count <lower limit of normal; (j) clinically relevant abnormalities in the 12-lead electrocardiogram (ECG) measured at prior to administering; (k) a psychiatric or behavioral disorder; and (l) currently or in the past 4 weeks, medication of an anticoagulant, wherein the anticoagulant is not aspirin. In some embodiments, the human subject is additionally characterized by not having all of the following: (a) one of the following mutations in the SCN1A gene: Thr226Met, Leu263Val, Val422Leu, Thr1174Ser, Trp1204Arg, Pro1345Ser, Gln1489Lys, Phe1499Leu, Arg1575Cys, Val1611Phe, Leu1624Pro, Arg1648Cys, Leu1649Gln, Leu1670Trp, Gly1674Arg, and Asp1866Tyr; (b) a known pathogenic mutation in another gene that causes epilepsy, wherein the pathogenic mutation is homozygous in cases of known recessive disease; (c) currently treated with a sodium channel blocker as maintenance treatment and an anticoagulant, wherein the sodium channel blocker is phenytoin, carbamazepine, oxcarbazepine, lamotrigine, lacosamide, or rufinamide, and wherein the anticoagulant is not an aspirin; (d) clinically, significantly unstable medical conditions other than epilepsy; (e) clinically, relevant symptoms or a clinically significant illness in the 4 weeks prior to administering, other than epilepsy; (f) a history of brain or spinal cord disease other than epilepsy or Dravet Syndrome; or a history of bacterial meningitis or brain malformation; (g) a spinal deformity or other condition that alters the free flow of cerebrospinal fluid (CSF) or having an implanted CSF drainage shunt; (h) clinically significant abnormal laboratory values prior to administering; (i) aspartate aminotransferase or alanine aminotransferase >2.5-fold upper limit of normal, serum creatinine >upper limit of normal or platelet count <lower limit of normal; (j) clinically relevant abnormalities in the 12-lead electrocardiogram (ECG) measured at prior to administering; (k) a psychiatric or behavioral disorder; and (l) currently or in the past 4 weeks, medication of an anticoagulant, wherein the anticoagulant is not aspirin.

[0131] In some embodiments, the human subject is additionally characterized by not having known pathogenic mutation in another gene that causes epilepsy. In some embodiments, the human subject is additionally characterized by not having had clinically relevant symptoms or a clinically significant illness in the past 4 weeks other than epilepsy. In some embodiments, the human subject is additionally characterized by not having specific mutations of SCN1A gene demonstrated to cause gain-of-function. In some embodiments, the human subject is additionally characterized by currently not being treated with an anti-epileptic drug acting predominantly as a sodium channel blocker. In some embodiments, the human subject is additionally characterized by not having clinically significant unstable medical condition(s) other than epilepsy.

[0132] In some embodiments, the human subject has pediatric epilepsy, epileptic encephalopathies, refractory myoclonic epilepsy, or severe myoclonic epilepsy in infancy. In some embodiments, the human subject has myoclonic epilepsies, generalized epilepsy, epilepsy, brain diseases, central nervous system diseases, nervous system diseases, or epileptic syndromes. In some embodiments, the methods of treatment as described herein comprise methods of treating or reducing the likelihood of developing a disease or condition, wherein the disease or condition is pediatric epilepsy, epileptic encephalopathies, refractory myoclonic epilepsy, or severe myoclonic epilepsy in infancy. In some embodiments, the methods of treatment as described herein comprise methods of treating or reducing the likelihood of developing a disease or condition, wherein the disease or condition is myoclonic epilepsies, generalized epilepsy, epilepsy, brain diseases, central nervous system diseases, nervous system diseases, or epileptic syndromes. In some embodiments, the human subject has seizures that are not controlled by current antiepileptic drug (AED) regimen. In some embodiments, the AED regimen comprises clobazam, cannabidiol, levetiracetam, stiripentol, or valproic acid/valproate.

[0133] The term “magnetic resonance imaging lesion,” as used herein, refers to any damage or abnormal change in the tissue of an organism, caused by the magnetic resonance imaging. The term “magnetic resonance imaging,” as used herein, refers to a form of medical imaging that measures the response of the atomic nuclei of body tissues to high-frequency radio waves when placed in a strong magnetic field, and that produces images of the internal organs.

[0134] The term “ketogenic diet,” as used herein, refers to a high-fat, adequate-protein, low-carbohydrate diet that in medicine is used, for example, to treat refractory epilepsy in children. The diet forces the body to burn fats rather than carbohydrates.

[0135] The term “a vagal nerve stimulator” or “vagus nerve stimulation (VNS)” as used herein, refers to a medical treatment that involves delivering electrical impulses to the vagus nerve. It is, for example, used as an add-on treatment for certain types of intractable epilepsy and treatment-resistant depression.

[0136] The term “cannabinoid,” as used herein, refers to a chemical found in cannabis. Exemplary cannabinoids include, but are not limited to, the phytocannabinoid tetrahydrocannabinol (THC) (Delta9-THC or Delta8-THC), and cannabidiol (CBD). Cannabinoids, as used herein, may be natural or synthetic chemicals.

[0137] The term “marijuana” or “cannabis,” as used herein, refers to a psychoactive drug from the Cannabis plant used primarily for medical or recreational purposes. An exemplary main psychoactive component of cannabis is tetrahydrocannabinol (THC).

[0138] The term “sodium channel blocker,” as used herein, refers to a drug which impair the conduction of sodium ions (Na+) through sodium channels. Examples of sodium channel blockers include, but are not limited to, alkaloids (e.g., saxitoxin, neosaxitoxin, tetrodotoxin), local anesthetics (e.g., lidocaine), anticonvulsants (e.g., phenytoin, oxcarbazepine (derivative of carbamazepine)), and class Ia (e.g., quinidine, procainamide and disopyramide), class Ib (e.g., lidocaine, mexiletine, tocainide, and phenytoin) and class Ic (e.g., encainide, flecainide, moricizine, and propafenone) antiarrhythmic agents.

[0139] The term “cerebrospinal fluid (CSF),” as used herein, refers to a clear, colorless body fluid found in the brain and spinal cord. CSF, for example, acts as a cushion or buffer, providing basic mechanical and immunological protection to the brain inside the skull, and plays a vital function in the cerebral autoregulation of cerebral blood flow. The term “artificial cerebrospinal fluid (aCSF),” as used herein, refers to a biological buffer solution that is commonly used as a vehicle solution for administration of agents to the central nervous system (CNS). aCSF, for instance, closely matches the electrolyte concentrations and physiological compatibility of endogenous CSF to enable a vital environment for neuronal tissue by maintaining the homeostasis, osmolarity, and pH at physiological levels.

[0140] The term “CSF drainage shunt,” as used herein, refers to a system that drains excess fluid from the brain to another part of the body where the fluid is absorbed as part of the circulatory process. CSF shunts are, for example, used to treat hydrocephalus.

[0141] The term “electrocardiogram (EKG or ECG),” as used herein, refers to a test that measures the electrical activity of the heartbeat, e.g., producing a graph of voltage versus time of the electrical activity of the heart. With each beat, an electrical impulse (or “wave”) travels through the heart.

[0142] “Aspartate transaminase (AST),” also known as aspartate aminotransferase, AspAT/ASAT/AAT, or (serum) glutamic oxaloacetic transaminase (GOT, SGOT), as used herein, refers to a pyridoxal phosphate (PLP)-dependent transaminase enzyme (EC 2.6.1.1). AST includes any of the recombinant or naturally occurring forms of AST protein or variants or homologs thereof that maintain AST activity, (e.g., within at least 50%, 80%, 90%, 95%, 96%, 97%, 98%, 99% or 100% activity compared to AST). Exemplary AST activity includes, but are not limited to, playing a role in amino acid metabolism, for example, by catalyzing the reversible transfer of an α-amino group between aspartate and glutamate and, as such. In some aspects, the variants or homologs have at least 80%, 85%, 90%, 95%, 96%, 97%, 98%, 99% or 100% amino acid sequence identity across the whole sequence or a portion of the sequence (e.g., a 50, 100, 150 or 200 continuous amino acid portion) compared to a naturally occurring AST protein. In some embodiments, the AST protein is substantially identical to the protein identified by the UniProt reference number P17174 or a variant or homolog having substantial identity thereto. In some embodiments, the AST protein is substantially identical to the protein identified by the UniProt reference number P00505 or a variant or homolog having substantial identity thereto.

[0143] “Alanine transaminase (ALT),” also known as alanine aminotransferase (ALAT), serum glutamate-pyruvate transaminase (SGPT), or serum glutamic-pyruvic transaminase (SGPT), as used herein, refers to a transaminase enzyme (EC 2.6.1.2). ALT includes any of the recombinant or naturally occurring forms of ALT protein or variants or homologs thereof that maintain ALT activity, (e.g., within at least 50%, 80%, 90%, 95%, 96%, 97%, 98%, 99% or 100% activity compared to ALT). Exemplary ALT activity includes, but are not limited to, catalyzing the two parts of the alanine cycle. In some aspects, the variants or homologs have at least 80%, 85%, 90%, 95%, 96%, 97%, 98%, 99% or 100% amino acid sequence identity across the whole sequence or a portion of the sequence (e.g., a 50, 100, 150 or 200 continuous amino acid portion) compared to a naturally occurring ALT protein. In some embodiments, the ALT protein is substantially identical to the protein identified by the UniProt reference number P24298 or a variant or homolog having substantial identity thereto.

[0144] In some embodiments, serum AST level, serum ALT level, and their ratio (AST/ALT ratio) are measured clinically as biomarkers for liver health.

[0145] The term “laboratory vale,” as used herein refers to the value obtained by laboratory tests or measurements. Exemplary, non-limiting laboratory tests or measurements may be related to hematology, coagulation, clinical chemistry, plasma, urinalysis, serum, serum or urine pregnancy, urine, or cerebrospinal fluid.

### Therapeutic Schedule

[0146] In some embodiments, the first dose is a single dose. In some embodiments, the first dose is the first of multiple doses. In some embodiments, the method further comprises assessing tolerability or effectiveness of the pharmaceutical composition.

[0147] In some embodiments, the method as described herein further comprises administering to the human subject a pharmaceutical composition comprising the compound as described herein at a subsequent dose of 0.1, 0.5, 1, 2.5, 5, 6, 7, 8, 9, 10, 11, 12, 13, 14, 15, 16, 17, 18, 19, 20, 25, 30, 35, 40, 45, 50, 55, 60, 65, 70, 75, 80, 85, 90, 95, 100, 105, 110, 115, 120, 125, 130, 135, 140, 145, 150, 155, 160, 165, 170, 175, 180, 185, 190, 195, or 200 mg.

[0148] In some embodiments, the method as described herein further comprises administering to the human subject a pharmaceutical composition comprising the compound as described herein at a subsequent dose of from about 0.1 to about 1000 mg, from about 0.2 to about 1000 mg, from about 0.3 to about 1000 mg, from about 0.4 to about 1000 mg, from about 0.5 to about 1000 mg, from about 0.6 to about 1000 mg, from about 0.7 to about 1000 mg, from about 0.8 to about 1000 mg, from about 0.9 to about 1000 mg, 1 to about 1000 mg, from about 2 to about 1000 mg, from about 3 to about 1000 mg, from about 4 to about 1000 mg, from about 5 to about 1000 mg, from about 6 to about 1000 mg, from about 7 to about 1000 mg, from about 8 to about 1000 mg, from about 9 to about 1000 mg, from about 10 to about 1000 mg, from about 15 to about 1000 mg, from about 20 to about 1000 mg, from about 25 to about 1000 mg, from about 30 to about 1000 mg, from about 35 to about 1000 mg, from about 40 to about 1000 mg, from about 45 to about 1000 mg, from about 50 to about 1000 mg, from about 55 to about 1000 mg, from about 60 to about 1000 mg, from about 65 to about 1000 mg, from about 70 to about 1000 mg, from about 75 to about 1000 mg, from about 80 to about 1000 mg, from about 85 to about 1000 mg, from about 90 to about 1000 mg, from about 95 to about 1000 mg, from about 100 to about 1000 mg, from about 150 to about 1000 mg, from about 200 to about 1000 mg, from about 250 to about 1000 mg, from about 300 to about 1000 mg, from about 350 to about 1000 mg, from about 400 to about 1000 mg, from about 450 to about 1000 mg, from about 500 to about 1000 mg, from about 550 to about 1000 mg, from about 600 to about 1000 mg, from about 650 to about 1000 mg, from about 700 to about 1000 mg, from about 750 to about 1000 mg, from about 800 to about 1000 mg, from about 850 to about 1000 mg, from about 900 to about 1000 mg, or from about 950 to about 1000 mg.

[0149] In some embodiments, the method as described herein further comprises administering to the human subject a pharmaceutical composition comprising the compound as described herein at a subsequent dose of from 0.1 to 1000 mg, from 0.2 to 1000 mg, from 0.3 to 1000 mg, from 0.4 to 1000 mg, from 0.5 to 1000 mg, from 0.6 to 1000 mg, from 0.7 to 1000 mg, from 0.8 to 1000 mg, from 0.9 to 1000 mg, 1 to 1000 mg, from 2 to 1000 mg, from 3 to 1000 mg, from 4 to 1000 mg, from 5 to 1000 mg, from 6 to 1000 mg, from 7 to 1000 mg, from 8 to 1000 mg, from 9 to 1000 mg, from 10 to 1000 mg, from 15 to 1000 mg, from 20 to 1000 mg, from 25 to 1000 mg, from 30 to 1000 mg, from 35 to 1000 mg, from 40 to 1000 mg, from 45 to 1000 mg, from 50 to 1000 mg, from 55 to 1000 mg, from 60 to 1000 mg, from 65 to 1000 mg, from 70 to 1000 mg, from 75 to 1000 mg, from 80 to 1000 mg, from 85 to 1000 mg, from 90 to 1000 mg, from 95 to 1000 mg, from 100 to 1000 mg, from 150 to 1000 mg, from 200 to 1000 mg, from 250 to 1000 mg, from 300 to 1000 mg, from 350 to 1000 mg, from 400 to 1000 mg, from 450 to 1000 mg, from 500 to 1000 mg, from 550 to 1000 mg, from 600 to 1000 mg, from 650 to 1000 mg, from 700 to 1000 mg, from 750 to 1000 mg, from 800 to 1000 mg, from 850 to 1000 mg, from 900 to 1000 mg, or from 950 to 1000 mg.

[0150] In some embodiments, the method as described herein further comprises administering to the human subject a pharmaceutical composition comprising the compound as described herein at a subsequent dose of from about 0.1 to about 950 mg, from about 0.1 to about 900 mg, from about 0.1 to about 850 mg, from about 0.1 to about 800 mg, from about 0.1 to about 750 mg, from about 0.1 to about 700 mg, from about 0.1 to about 650 mg, from about 0.1 to about 600 mg, from about 0.1 to about 550 mg, from about 0.1 to about 500 mg, from about 0.1 to about 450 mg, from about 0.1 to about 400 mg, from about 0.1 to about 350 mg, from about 0.1 to about 300 mg, from about 0.1 to about 250 mg, from about 0.1 to about 200 mg, from about 0.1 to about 150 mg, from about 0.1 to about 100 mg, from about 0.1 to about 95 mg, from about 0.1 to about 90 mg, from about 0.1 to about 85 mg, from about 0.1 to about 80 mg, from about 0.1 to about 75 mg, from about 0.1 to about 70 mg, from about 0.1 to about 65 mg, from about 0.1 to about 60 mg, from about 0.1 to about 55 mg, from about 0.1 to about 50 mg, from about 0.1 to about 45 mg, from about 0.1 to about 40 mg, from about 0.1 to about 35 mg, from about 0.1 to about 30 mg, from about 0.1 to about mg, from about 0.1 to about 25 mg, from about 0.1 to about 20 mg, from about 0.1 to about 10 mg, from about 0.1 to about 9 mg, from about 0.1 to about 8 mg, from about 0.1 to about 7 mg, from about 0.1 to about 6 mg, from about 0.1 to about 5 mg, from about 0.1 to about 4 mg, from about 0.1 to about 3, from about 0.1 to about 2 mg, from about 0.1 to about 1 mg, from about 0.1 to about 0.9 mg, from about 0.1 to about 0.8 mg, from about 0.1 to about 0.7 mg, from about 0.1 to about 0.6 mg, from about 0.1 to about 0.5 mg, from about 0.1 to about 0.4 mg, from about 0.1 to about 0.3, or from about 0.1 to about 0.2 mg.

[0151] In some embodiments, the method as described herein further comprises administering to the human subject a pharmaceutical composition comprising the compound as described herein at a subsequent dose of from 0.1 to 950 mg, from 0.1 to 900 mg, from 0.1 to 850 mg, from 0.1 to 800 mg, from 0.1 to 750 mg, from 0.1 to 700 mg, from 0.1 to 650 mg, from 0.1 to 600 mg, from 0.1 to 550 mg, from 0.1 to 500 mg, from 0.1 to 450 mg, from 0.1 to 400 mg, from 0.1 to 350 mg, from 0.1 to 300 mg, from 0.1 to 250 mg, from 0.1 to 200 mg, from 0.1 to 150 mg, from 0.1 to 100 mg, from 0.1 to 95 mg, from 0.1 to 90 mg, from 0.1 to 85 mg, from 0.1 to 80 mg, from 0.1 to 75 mg, from 0.1 to 70 mg, from 0.1 to 65 mg, from 0.1 to 60 mg, from 0.1 to 55 mg, from 0.1 to 50 mg, from 0.1 to 45 mg, from 0.1 to 40 mg, from 0.1 to 35 mg, from 0.1 to 30 mg, from 0.1 to mg, from 0.1 to 25 mg, from 0.1 to 20 mg, from 0.1 to 10 mg, from 0.1 to 9 mg, from 0.1 to 8 mg, from 0.1 to 7 mg, from 0.1 to 6 mg, from 0.1 to 5 mg, from 0.1 to 4 mg, from 0.1 to 3, from 0.1 to 2 mg, from 0.1 to 1 mg, from 0.1 to 0.9 mg, from 0.1 to 0.8 mg, from 0.1 to 0.7 mg, from 0.1 to 0.6 mg, from 0.1 to 0.5 mg, from 0.1 to 0.4 mg, from 0.1 to 0.3, or from 0.1 to 0.2 mg.

[0152] In some embodiments, the method as described herein further comprises administering to the human subject a pharmaceutical composition comprising the compound as described herein at a subsequent dose of from about 1 to about 400 mg, from about 2 to about 400 mg, from about 3 to about 400 mg, from about 4 to about 400 mg, from about 5 to about 400 mg, from about 6 to about 400 mg, from about 7 to about 400 mg, from about 8 to about 400 mg, from about 9 to about 400 mg, from about 10 to about 400 mg, from about 20 to about 400 mg, from about 30 to about 400 mg, from about 40 to about 400 mg, from about 50 to about 400 mg, from about 60 to about 400 mg, from about 70 to about 400 mg, from about 80 to about 400 mg, from about 90 to about 400 mg, from about 100 to about 400 mg, from about 110 to about 400 mg, from about 120 to about 400 mg, from about 130 to about 400 mg, from about 140 to about 400 mg, from about 150 to about 400 mg, from about 160 to about 400 mg, from about 170 to about 400 mg, from about 180 to about 400 mg, from about 190 to about 400 mg, from about 200 to about 400 mg, from about 210 to about 400 mg, from about 220 to about 400 mg, from about 230 to about 400 mg, from about 240 to about 400 mg, from about 250 to about 400 mg, from about 260 to about 400 mg, from about 270 to about 400 mg, from about 280 to about 400 mg, from about 290 to about 400 mg, from about 300 to about 400 mg, from about 310 to about 400 mg, from about 320 to about 400 mg, from about 330 to about 400 mg, from about 340 to about 400 mg, from about 350 to about 400 mg, from about 360 to about 400 mg, from about 370 to about 400 mg, from about 380 to about 400 mg, or from about 390 to about 400 mg.

[0153] In some embodiments, the method as described herein further comprises administering to the human subject a pharmaceutical composition comprising the compound as described herein at a subsequent dose of from 1 to 400 mg, from 2 to 400 mg, from 3 to 400 mg, from 4 to 400 mg, from 5 to 400 mg, from 6 to 400 mg, from 7 to 400 mg, from 8 to 400 mg, from 9 to 400 mg, from 10 to 400 mg, from 20 to 400 mg, from 30 to 400 mg, from 40 to 400 mg, from 50 to 400 mg, from 60 to 400 mg, from 70 to 400 mg, from 80 to 400 mg, from 90 to 400 mg, from 100 to 400 mg, from 110 to 400 mg, from 120 to 400 mg, from 130 to 400 mg, from about 140 to 400 mg, from 150 to 400 mg, from about 160 to 400 mg, from 170 to 400 mg, from 180 to 400 mg, from 190 to 400 mg, from 200 to 400 mg, from 210 to 400 mg, from 220 to 400 mg, from 230 to 400 mg, from 240 to 400 mg, from 250 to 400 mg, from 260 to 400 mg, from 270 to 400 mg, from 280 to 400 mg, from 290 to 400 mg, from 300 to 400 mg, from 310 to 400 mg, from 320 to 400 mg, from 330 to 400 mg, from 340 to 400 mg, from 350 to 400 mg, from 360 to 400 mg, from 370 to 400 mg, from 380 to 400 mg, or from 390 to 400 mg.

[0154] In some embodiments, the method as described herein further comprises administering to the human subject a pharmaceutical composition comprising the compound as described herein at a subsequent dose of from about 10 to about 390 mg, from about 10 to about 380 mg, from about 10 to about 370 mg, from about 10 to about 360 mg, from about 10 to about 350 mg, from about 10 to about 340 mg, from about 10 to about 330 mg, from about 10 to about 320 mg, from about 10 to about 310 mg, from about 10 to about 300 mg, from about 10 to about 290 mg, from about 10 to about 280 mg, from about 10 to about 270 mg, from about 10 to about 260 mg, from about 10 to about 250 mg, from about 10 to about 240 mg, from about 10 to about 230 mg, from about 10 to about 220 mg, from about 10 to about 210 mg, from about 10 to about 200 mg, from about 10 to about 190 mg, from about 10 to about 180 mg, from about 10 to about 170 mg, from about 10 to about 160 mg, from about 10 to about 150 mg, from about 10 to about 140 mg, from about 10 to about 130 mg, from about 10 to about 120 mg, from about 10 to about 110 mg, from about 10 to about 90 mg, from about 10 to about 80 mg, from about 10 to about 70 mg, from about 10 to about 60 mg, from about 10 to about 50 mg, from about 10 to about 40 mg, from about 10 to about 30 mg, or from about 10 to about 20 mg.

[0155] In some embodiments, the method as described herein further comprises administering to the human subject a pharmaceutical composition comprising the compound as described herein at a subsequent dose of from 10 to 390 mg, from 10 to 380 mg, from 10 to 370 mg, from 10 to 360 mg, from 10 to 350 mg, from 10 to 340 mg, from 10 to 330 mg, from 10 to 320 mg, from 10 to 310 mg, from 10 to 300 mg, from 10 to 290 mg, from 10 to 280 mg, from 10 to 270 mg, from 10 to 260 mg, from 10 to 250 mg, from 10 to 240 mg, from 10 to 230 mg, from 10 to 220 mg, from 10 to 210 mg, from 10 to 200 mg, from 10 to 190 mg, from 10 to 180 mg, from 10 to 170 mg, from 10 to 160 mg, from 10 to 150 mg, from 10 to 140 mg, from 10 to 130 mg, from 10 to 120 mg, from 10 to 110 mg, from 10 to 90 mg, from 10 to 80 mg, from 10 to 70 mg, from 10 to 60 mg, from 10 to 50 mg, from 10 to 40 mg, from 10 to 30 mg, or from 10 to 20 mg.

[0156] In some embodiments mg, the method as described herein further comprises administering to the human subject a pharmaceutical composition comprising the compound as described herein at a subsequent dose of about 1 mg, about 2 mg, about 3 mg, about 4 mg, about 5 mg, about 6 mg, about 7 mg, about 8 mg, about 9 mg, about 10 mg, about 11 mg, about 12 mg, about 13 mg, about 14 mg, about 15 mg, about 16 mg, about 17 mg, about 18 mg, about 19 mg, about 20 mg, about 21 mg, about 22 mg, about 23 mg, about 24 mg, about 25 mg, about 26 mg, about 27 mg, about 28 mg, about 29 mg, about 30 mg, about 31 mg, about 32 mg, about 33 mg, about 34 mg, about 35 mg, about 36 mg, about 37 mg, about 38 mg, about 39 mg, about 40 mg, about 41 mg, about 42 mg, about 43 mg, about 44 mg, about 45 mg, about 46 mg, about 47 mg, about 48 mg, about 49 mg, about 50 mg, about 51 mg, about 52 mg, about 53 mg, about 54 mg, about 55 mg, about 56 mg, about 57 mg, about 58 mg, about 59 mg, about 60 mg, about 61 mg, about 62 mg, about 63 mg, about 64 mg, about 65 mg, about 66 mg, about 67 mg, about 68 mg, about 69 mg, about 70 mg, about 71 mg, about 72 mg, about 73 mg, about 74 mg, about 75 mg, about 76 mg, about 77 mg, about 78 mg, about 79 mg, about 80 mg, about 81 mg, about 82 mg, about 83 mg, about 84 mg, about 85 mg, about 86 mg, about 87 mg, about 88 mg, about 89 mg, about 90 mg, about 91 mg, about 92 mg, about 93 mg, about 94 mg, about 95 mg, about 96 mg, about 97 mg, about 98 mg, about 99 mg, about 100 mg, about 101 mg, about 102 mg, about 103 mg, about 104 mg, about 105 mg, about 106 mg, about 107 mg, about 108 mg, about 109 mg, about 110 mg, about 111 mg, about 112 mg, about 113 mg, about 114 mg, about 115 mg, about 116 mg, about 117 mg, about 118 mg, about 119 mg, about 120 mg, about 121 mg, about 122 mg, about 123 mg, about 124 mg, about 125 mg, about 126 mg, about 127 mg, about 128 mg, about 129 mg, about 130 mg, about 131 mg, about 132 mg, about 133 mg, about 134 mg, about 135 mg, about 136 mg, about 137 mg, about 138 mg, about 139 mg, about 140 mg, about 141 mg, about 142 mg, about 143 mg, about 144 mg, about 145 mg, about 146 mg, about 147 mg, about 148 mg, about 149 mg, about 150 mg, about 151 mg, about 152 mg, about 153 mg, about 154 mg, about 155 mg, about 156 mg, about 157 mg, about 158 mg, about 159 mg, about 160 mg, about 161 mg, about 162 mg, about 163 mg, about 164 mg, about 165 mg, about 166 mg, about 167 mg, about 168 mg, about 169 mg, about 170 mg, about 171 mg, about 172 mg, about 173 mg, about 174 mg, about 175 mg, about 176 mg, about 177 mg, about 178 mg, about 179 mg, about 180 mg, about 181 mg, about 182 mg, about 183 mg, about 184 mg, about 185 mg, about 186 mg, about 187 mg, about 188 mg, about 189 mg, about 190 mg, about 191 mg, about 192 mg, about 193 mg, about 194 mg, about 195 mg, about 196 mg, about 197 mg, about 198 mg, about 199 mg, about 200 mg, about 201 mg, about 202 mg, about 203 mg, about 204 mg, about 205 mg, about 206 mg, about 207 mg, about 208 mg, about 209 mg, about 210 mg, about 211 mg, about 212 mg, about 213 mg, about 214 mg, about 215 mg, about 216 mg, about 217 mg, about 218 mg, about 219 mg, about 220 mg, about 221 mg, about 222 mg, about 223 mg, about 224 mg, about 225 mg, about 226 mg, about 227 mg, about 228 mg, about 229 mg, about 230 mg, about 231 mg, about 232 mg, about 233 mg, about 234 mg, about 235 mg, about 236 mg, about 237 mg, about 238 mg, about 239 mg, about 240 mg, about 241 mg, about 242 mg, about 243 mg, about 244 mg, about 245 mg, about 246 mg, about 247 mg, about 248 mg, about 249 mg, about 250 mg, about 251 mg, about 252 mg, about 253 mg, about 254 mg, about 255 mg, about 256 mg, about 257 mg, about 258 mg, about 259 mg, about 260 mg, about 261 mg, about 262 mg, about 263 mg, about 264 mg, about 265 mg, about 266 mg, about 267 mg, about 268 mg, about 269 mg, about 270 mg, about 271 mg, about 272 mg, about 273 mg, about 274 mg, about 275 mg, about 276 mg, about 277 mg, about 278 mg, about 279 mg, about 280 mg, about 281 mg, about 282 mg, about 283 mg, about 284 mg, about 285 mg, about 286 mg, about 287 mg, about 288 mg, about 289 mg, about 290 mg, about 291 mg, about 292 mg, about 293 mg, about 294 mg, about 295 mg, about 296 mg, about 297 mg, about 298 mg, about 299 mg, about 300 mg, about 301 mg, about 302 mg, about 303 mg, about 304 mg, about 305 mg, about 306 mg, about 307 mg, about 308 mg, about 309 mg, about 310 mg, about 311 mg, about 312 mg, about 313 mg, about 314 mg, about 315 mg, about 316 mg, about 317 mg, about 318 mg, about 319 mg, about 320 mg, about 321 mg, about 322 mg, about 323 mg, about 324 mg, about 325 mg, about 326 mg, about 327 mg, about 328 mg, about 329 mg, about 330 mg, about 331 mg, about 332 mg, about 333 mg, about 334 mg, about 335 mg, about 336 mg, about 337 mg, about 338 mg, about 339 mg, about 340 mg, about 341 mg, about 342 mg, about 343 mg, about 344 mg, about 345 mg, about 346 mg, about 347 mg, about 348 mg, about 349 mg, about 350 mg, about 351 mg, about 352 mg, about 353 mg, about 354 mg, about 355 mg, about 356 mg, about 357 mg, about 358 mg, about 359 mg, about 360 mg, about 361 mg, about 362 mg, about 363 mg, about 364 mg, about 365 mg, about 366 mg, about 367 mg, about 368 mg, about 369 mg, about 370 mg, about 371 mg, about 372 mg, about 373 mg, about 374 mg, about 375 mg, about 376 mg, about 377 mg, about 378 mg, about 379 mg, about 380 mg, about 381 mg, about 382 mg, about 383 mg, about 384 mg, about 385 mg, about 386 mg, about 387 mg, about 388 mg, about 389 mg, about 390 mg, about 391 mg, about 392 mg, about 393 mg, about 394 mg, about 395 mg, about 396 mg, about 397 mg, about 398 mg, about 399 mg, or 400 mg.

[0157] In some embodiments mg, the method as described herein further comprises administering to the human subject a pharmaceutical composition comprising the compound as described herein at a subsequent dose of 1 mg, 2 mg, 3 mg, 4 mg, 5 mg, 6 mg, 7 mg, 8 mg, 9 mg, 10 mg, 11 mg, 12 mg, 13 mg, 14 mg, 15 mg, 16 mg, 17 mg, 18 mg, 19 mg, 20 mg, 21 mg, 22 mg, 23 mg, 24 mg, 25 mg, 26 mg, 27 mg, 28 mg, 29 mg, 30 mg, 31 mg, 32 mg, 33 mg, 34 mg, 35 mg, 36 mg, 37 mg, 38 mg, 39 mg, 40 mg, 41 mg, 42 mg, 43 mg, 44 mg, 45 mg, 46 mg, 47 mg, 48 mg, 49 mg, 50 mg, 51 mg, 52 mg, 53 mg, 54 mg, 55 mg, 56 mg, 57 mg, 58 mg, 59 mg, 60 mg, 61 mg, 62 mg, 63 mg, 64 mg, 65 mg, 66 mg, 67 mg, 68 mg, 69 mg, 70 mg, 71 mg, 72 mg, 73 mg, 74 mg, 75 mg, 76 mg, 77 mg, 78 mg, 79 mg, 80 mg, 81 mg, 82 mg, 83 mg, 84 mg, 85 mg, 86 mg, 87 mg, 88 mg, 89 mg, 90 mg, 91 mg, 92 mg, 93 mg, 94 mg, 95 mg, 96 mg, 97 mg, 98 mg, 99 mg, 100 mg, 101 mg, 102 mg, 103 mg, 104 mg, 105 mg, 106 mg, 107 mg, 108 mg, 109 mg, 110 mg, 111 mg, 112 mg, 113 mg, 114 mg, 115 mg, 116 mg, 117 mg, 118 mg, 119 mg, 120 mg, 121 mg, 122 mg, 123 mg, 124 mg, 125 mg, 126 mg, 127 mg, 128 mg, 129 mg, 130 mg, 131 mg, 132 mg, 133 mg, 134 mg, 135 mg, 136 mg, 137 mg, 138 mg, 139 mg, 140 mg, 141 mg, 142 mg, 143 mg, 144 mg, 145 mg, 146 mg, 147 mg, 148 mg, 149 mg, 150 mg, 151 mg, 152 mg, 153 mg, 154 mg, 155 mg, 156 mg, 157 mg, 158 mg, 159 mg, 160 mg, 161 mg, 162 mg, 163 mg, 164 mg, 165 mg, 166 mg, 167 mg, 168 mg, 169 mg, 170 mg, 171 mg, 172 mg, 173 mg, 174 mg, 175 mg, 176 mg, 177 mg, 178 mg, 179 mg, 180 mg, 181 mg, 182 mg, 183 mg, 184 mg, 185 mg, 186 mg, 187 mg, 188 mg, 189 mg, 190 mg, 191 mg, 192 mg, 193 mg, 194 mg, 195 mg, 196 mg, 197 mg, 198 mg, 199 mg, 200 mg, 201 mg, 202 mg, 203 mg, 204 mg, 205 mg, 206 mg, 207 mg, 208 mg, 209 mg, 210 mg, 211 mg, 212 mg, 213 mg, 214 mg, 215 mg, 216 mg, 217 mg, 218 mg, 219 mg, 220 mg, 221 mg, 222 mg, 223 mg, 224 mg, 225 mg, 226 mg, 227 mg, 228 mg, 229 mg, 230 mg, 231 mg, 232 mg, 233 mg, 234 mg, 235 mg, 236 mg, 237 mg, 238 mg, 239 mg, 240 mg, 241 mg, 242 mg, 243 mg, 244 mg, 245 mg, 246 mg, 247 mg, 248 mg, 249 mg, 250 mg, 251 mg, 252 mg, 253 mg, 254 mg, 255 mg, 256 mg, 257 mg, 258 mg, 259 mg, 260 mg, 261 mg, 262 mg, 263 mg, 264 mg, 265 mg, 266 mg, 267 mg, 268 mg, 269 mg, 270 mg, 271 mg, 272 mg, 273 mg, 274 mg, 275 mg, 276 mg, 277 mg, 278 mg, 279 mg, 280 mg, 281 mg, 282 mg, 283 mg, 284 mg, 285 mg, 286 mg, 287 mg, 288 mg, 289 mg, 290 mg, 291 mg, 292 mg, 293 mg, 294 mg, 295 mg, 296 mg, 297 mg, 298 mg, 299 mg, 300 mg, 301 mg, 302 mg, 303 mg, 304 mg, 305 mg, 306 mg, 307 mg, 308 mg, 309 mg, 310 mg, 311 mg, 312 mg, 313 mg, 314 mg, 315 mg, 316 mg, 317 mg, 318 mg, 319 mg, 320 mg, 321 mg, 322 mg, 323 mg, 324 mg, 325 mg, 326 mg, 327 mg, 328 mg, 329 mg, 330 mg, 331 mg, 332 mg, 333 mg, 334 mg, 335 mg, 336 mg, 337 mg, 338 mg, 339 mg, 340 mg, 341 mg, 342 mg, 343 mg, 344 mg, 345 mg, 346 mg, 347 mg, 348 mg, 349 mg, 350 mg, 351 mg, 352 mg, 353 mg, 354 mg, 355 mg, 356 mg, 357 mg, 358 mg, 359 mg, 360 mg, 361 mg, 362 mg, 363 mg, 364 mg, 365 mg, 366 mg, 367 mg, 368 mg, 369 mg, 370 mg, 371 mg, 372 mg, 373 mg, 374 mg, 375 mg, 376 mg, 377 mg, 378 mg, 379 mg, 380 mg, 381 mg, 382 mg, 383 mg, 384 mg, 385 mg, 386 mg, 387 mg, 388 mg, 389 mg, 390 mg, 391 mg, 392 mg, 393 mg, 394 mg, 395 mg, 396 mg, 397 mg, 398 mg, 399 mg, or 400 mg

[0158] In some embodiments, the method as described herein further comprises assessing tolerability or effectiveness of the pharmaceutical composition. In some embodiments, the subsequent dose is lower than the previous dose following an indication that administration of the previous dose is not tolerated. In some embodiments, the subsequent dose is the same as the previous dose following an indication that administration of the previous dose is effective. In some embodiments, the subsequent dose is lower than the previous dose following an indication that administration of the previous dose is effective. In some embodiments, the subsequent dose is higher than the previous dose following an indication that administration of the previous dose is not effective.

[0159] In some embodiments, the subsequent doses are administered at least 1, 2, 3, 4, 5, 6, 7, 8, 9, 10, 11, or 12 months after administration of the previous dose.

[0160] In some embodiments, the subsequent doses are administered at least 1, 2, 3, 4, 5, 6, 7, 8, 9, 10, 11, 12, 13, 14, 15, 16, 17, 18, 19, 20, 21, 22, 23, 24, 25, 26, 27, 28, 29, or 30 hours after administration of the previous dose. In some embodiments, the subsequent doses are administered at least 1, 2, 3, 4, 5, 6, 7, 8, 9, 10, 11, 12, 13, 14, 15, 16, 17, 18, 19, 20, 21, 22, 23, 24, 25, 26, 27, 28, 29, or 30 days after administration of the previous dose. In some embodiments, the subsequent doses are administered at least 1, 2, 3, 4, 5, 6, 7, 8, 9, 10, 11, 12, 13, 14, 15, 16, 17, 18, 19, 20, 21, 22, 23, 24, 25, 26, 27, 28, 29, 30, 31, 32, 33, 34, 35, or 36 weeks after administration of the previous dose. In some embodiments, the subsequent doses are administered at least 1, 2, 3, 4, 5, 6, 7, 8, 9, 10, 11, 12, 13, 14, 15, 16, 17, 18, 19, 20, 21, 22, 23, 24, 25, 26, 27, 28, 29, 30, 31, 32, 33, 34, 35, or 36 months after administration of the previous dose. In some embodiments, the subsequent doses are administered at least 1, 2, 3, 4, 5, 6, 7, 8, 9 or 10 years after administration of the previous dose.

[0161] In some embodiments, the subsequent doses are administered at the same interval. For example, every subsequent dose is administered at the interval of 1, 2, 3, 4, 5, 6, 7, 8, 9, 10, 11, 12, 13, 14, 15, 16, 17, 18, 19, 20, 21, 22, 23, 24, 25, 26, 27, 28, 29, or 30 hours after administration of the previous dose. In some embodiments, every subsequent dose is administered at the interval of 1, 2, 3, 4, 5, 6, 7, 8, 9, 10, 11, 12, 13, 14, 15, 16, 17, 18, 19, 20, 21, 22, 23, 24, 25, 26, 27, 28, 29, or 30 days after administration of the previous dose. In some embodiments, every subsequent dose is administered at the interval of 1, 2, 3, 4, 5, 6, 7, 8, 9, 10, 11, 12, 13, 14, 15, 16, 17, 18, 19, 20, 21, 22, 23, 24, 25, 26, 27, 28, 29, 30, 31, 32, 33, 34, 35, or 36 weeks after administration of the previous dose. In some embodiments, every subsequent dose is administered at the interval of 1, 2, 3, 4, 5, 6, 7, 8, 9, 10, 11, 12, 13, 14, 15, 16, 17, 18, 19, 20, 21, 22, 23, 24, 25, 26, 27, 28, 29, 30, 31, 32, 33, 34, 35, or 36 months after administration of the previous dose.

[0162] In some embodiments, the subsequent doses are administered at the different intervals.

[0163] In some embodiments, the dose frequency is maintained or reduced following an indication that the previous dose is effective. In some embodiments, the dose frequency is increased following an indication that the previous dose is not effective. In some embodiments, the method further comprises administrating at least one additional therapeutic agent or therapy. In some embodiments, the at least one additional therapeutic agent or therapy is administered at the same time as the dose. In some embodiments, the at least one additional therapeutic agent or therapy is administered prior to administration of the dose. In some embodiments, the at least one additional therapeutic agent or therapy is administered after administration of the dose.

### Loading and Maintenance Dose

[0164] In some embodiments, the method as described herein comprises administering to the human subject a pharmaceutical composition comprising the compound according to chemical structure (I) at least a first loading dose amount of from about 20 to about 80 mg and one or more maintenance doses, wherein the one or more maintenance doses contain a dose amount that is different from the first loading dose amount. In some embodiments, the method as described herein comprises administering to the human subject a pharmaceutical composition comprising the compound according to chemical structure (II) at a first dose amount of from about 30 to about 70 mg and one or more maintenance doses, wherein the one or more maintenance doses contain a dose amount that is different from the first loading dose amount.

[0165] In some embodiments, the first dose (also called first loading dose) is the first of one of more loading doses. In some embodiments, the first loading dose contains the compound at a dose amount of about 30 mg, 32.5 mg, 35 mg, 37.5 mg, 40 mg, 42.5 mg, 45 mg, 47.5 mg, 50 mg, 52.5 mg, 55 mg, 57.5 mg, 60 mg, 62.5 mg, 65 mg, 67.5 mg, 70 mg, 72.5 mg, 75 mg, 77.5 mg, or 80 mg. In some embodiments, the first dose of the one or more loading doses contains the compound at a dose amount of from 30 to 40 mg. In some embodiments, the first dose of the one or more loading doses contains the compound at a dose amount of from 35 to 40 mg. In some embodiments, the first dose of the one or more loading doses contains the compound at a dose amount of from 30 to 45 mg. In some embodiments, the first dose of the one or more loading doses contains the compound at a dose amount of from 35 to 45 mg. In some embodiments, the first dose of the one or more loading doses contains the compound at a dose amount of from 30 to 50 mg. In some embodiments, the first dose of the one or more loading doses contains the compound at a dose amount of from 35 to 50 mg. In some embodiments, the first dose of the one or more loading doses contains the compound at a dose amount of from 30 to 35 mg. In some embodiments, the first dose of the one or more loading doses contains the compound at a dose amount of from 30 to 80 mg. In some embodiments, the first dose of the one or more loading doses contains the compound at a dose amount of from 30 to 70 mg. In some embodiments, the first dose of the one or more loading doses contains the compound at a dose amount of from 30 to 60 mg. In some embodiments, the first dose of the one or more loading doses contains the compound at a dose amount from 50 to 70 mg. In some embodiments, the first dose of the one or more loading doses contains the compound at a dose amount from 50 to 80 mg. In some embodiments, the first dose of the one or more loading doses contains the compound at a dose amount is from about 45 to 80 mg. In some embodiments, the first dose of the one or more loading doses contains the compound at a dose amount is from about 45 to 70 mg. In some embodiments, the first dose of the one or more loading doses contains the compound at a dose amount is from about 45 to 60 mg. In some embodiments, the first dose of the one or more loading doses contains the compound at a dose amount of about 30 mg. In some embodiments, the first dose of the one or more loading doses contains the compound at a dose amount of about 35 mg. In some embodiments, the first dose of the one or more loading doses contains the compound at a dose amount of about 40 mg. In some embodiments, the first dose of the one or more loading doses contains the compound at a dose amount of about 45 mg. In some embodiments, the first dose of the one or more loading doses contains the compound at a dose amount of about 50 mg. In some embodiments, the first dose of the one or more loading doses contains the compound at a dose amount of about 60 mg. In some embodiments, the first dose of the one or more loading doses contains the compound at a dose amount of about 70 mg. In some embodiments, the first dose of the one or more loading doses contains the compound at a dose amount of about 80 mg.

[0166] In some embodiments, the method comprises administering only one first dose of the one or more loading doses. In some embodiments, the method comprises administering two doses of the loading dose. In some embodiments, the method comprises administering three doses of the loading dose. In some embodiments, the method comprises administering four doses of the loading dose. In some embodiments, the method comprises administering five doses of the loading dose. In some embodiments, the method comprises administering at least two doses of the loading dose. In some embodiments, the method comprises administering at least three doses of the loading dose. In some embodiments, the method comprises administering at least four doses of the loading dose. In some embodiments, the method comprises administering from 2 to 5 doses of the loading dose. In some embodiments, the method comprises administering from 2 to 4 doses of the loading dose. In some embodiments, the method comprises administering from 2 to 3 doses of the loading dose. In some embodiments, the method comprises administering two doses of the loading dose, wherein the loading dose contains the compound at a dose amount of about 30 mg. In some embodiments, the method comprises administering three doses of the loading dose, wherein the loading dose contains the compound at a dose amount of about 30 mg. In some embodiments, the method comprises administering four doses of the loading dose, wherein the loading dose contains the compound at a dose amount of about 30 mg. In some embodiments, the method comprises administering two doses of the loading dose, wherein the loading dose contains the compound at a dose amount of about 45 mg. In some embodiments, the method comprises administering three doses of the loading dose, wherein the loading dose contains the compound at a dose amount of about 45 mg. In some embodiments, the method comprises administering two doses of the loading dose, wherein the loading dose contains the compound at a dose amount of about 60 mg. In some embodiments, the method comprises administering three doses of the loading dose, wherein the loading dose contains the compound at a dose amount of about 60 mg. In some embodiments, the method comprises administering two doses of the loading dose, wherein the loading dose contains the compound at a dose amount of about 70 mg. In some embodiments, the method comprises administering three doses of the loading dose, wherein the loading dose contains the compound at a dose amount of about 70 mg. In some embodiments, the method comprises administering two doses of the loading dose, wherein the loading dose contains the compound at a dose amount of about 80 mg. In some embodiments, the method comprises administering three doses of the loading dose, wherein the loading dose contains the compound at a dose amount of about 80 mg.

[0167] In some embodiments, a first loading dose of the one or more loading dose doses is administered at least 1, 2, 3, 4, 5, 6, 7, 8, 9, 10, 11, or 12 months after administration of the first dose. In some embodiments, a first loading dose of the one or more loading dose doses is administered at least 1, 2, 3, 4, 5, 6, 7, or 8 weeks after administration of the first dose. In some embodiments, a first loading dose of the one or more loading dose doses is administered about 4 months after the first dose is administered. In some embodiments, the one or more loading dose doses is administered at least 1, 2, 3, 4, 5, 6, 7, 8, 9, 10, 11, or 12 months after administration of a dose immediately prior. In some embodiments, the one or more loading dose doses is administered about 2 months after administration of a dose immediately prior. In some embodiments, the one or more loading dose doses is administered about 3 months after administration of a dose immediately prior. In some embodiments, the one or more loading dose doses is administered about 4 months after administration of a dose immediately prior. In some embodiments, the one or more loading dose doses is administered about 5 months after administration of a dose immediately prior. In some embodiments, the one or more loading dose doses is administered at least 1, 2, 3, 4, 5, 6, 7, or 8 weeks after administration of a dose immediately prior. In some embodiments, each loading dose of the one or more loading dose doses is administered about 4 months after the human subject has been administered a dose immediately prior. In some embodiments, dose frequency is maintained or reduced following an indication that the previous dose is effective. In some embodiments, dose frequency is increased following an indication that the previous dose is not effective.

[0168] In some embodiments, the one or more maintenance doses are higher than the first dose. In some embodiments, the one or more maintenance doses are lower than the first dose. In some embodiments, the one or more maintenance doses contain the compound at a dose amount of about 10, 15, 20, 25, 30, 35, 40, 45, 50, 55, 60, 65, 70, 75, or 80 mg. In some embodiments, the one or more maintenance doses contain the compound at a dose amount of 10, 11, 12, 13, 14, 15, 16, 17, 18, 19, 20, 22.5, 25, 27.5, 30, 32.5, 35, 37.5, 40, 42.5, 45, 47.5, 50, 52.5, 55, 57.5, 60, 62.5, 65, 67.5, 70, 72.5, 75, 77.5, 80, 82.5, 85, 87.5, 90, 92.5, 95, 97.5, or 100 mg. In some embodiments, the one or more maintenance doses contain the compound at a dose amount of from 10 to 45 mg. In some embodiments, the one or more maintenance doses contain the compound at a dose amount of from 15 to 45 mg. In some embodiments, the one or more maintenance doses contain the compound at a dose amount of from 20 to 45 mg. In some embodiments, the one or more maintenance doses contain the compound at a dose amount of from 25 to 45 mg. In some embodiments, the one or more maintenance doses contain the compound at a dose amount of from 30 to 45 mg. In some embodiments, the one or more maintenance doses contain the compound at a dose amount of from 35 to 45 mg. In some embodiments, the one or more maintenance doses contain the compound at a dose amount of from 10 to 40 mg. In some embodiments, the one or more maintenance doses contain the compound at a dose amount of from 15 to 40 mg. In some embodiments, the one or more maintenance doses contain the compound at a dose amount of from 20 to 40 mg. In some embodiments, the one or more maintenance doses contain the compound at a dose amount of from 25 to 40 mg. In some embodiments, the one or more maintenance doses contain the compound at a dose amount of from 30 to 40 mg. In some embodiments, the one or more maintenance doses contain the compound at a dose amount of from 35 to 40 mg. In some embodiments, the one or more maintenance doses contain the compound at a dose amount of from 10 to 35 mg. In some embodiments, the one or more maintenance doses contain the compound at a dose amount of from 15 to 35 mg. In some embodiments, the one or more maintenance doses contain the compound at a dose amount of from 20 to 35 mg. In some embodiments, the one or more maintenance doses contain the compound at a dose amount of from 25 to 35 mg. In some embodiments, the one or more maintenance doses contain the compound at a dose amount of from 30 to 35 mg. In some embodiments, the one or more maintenance doses contain the compound at a dose amount of from 10 to 30 mg. In some embodiments, the one or more maintenance doses contain the compound at a dose amount of from 15 to 30 mg. In some embodiments, the one or more maintenance doses contain the compound at a dose amount of from 20 to 30 mg. In some embodiments, the one or more maintenance doses contain the compound at a dose amount of from 25 to 30 mg. In some embodiments, the one or more maintenance doses contain the compound at a dose amount of from 10 to 25 mg. In some embodiments, the one or more maintenance doses contain the compound at a dose amount of from 15 to 25 mg. In some embodiments, the one or more maintenance doses contain the compound at a dose amount of from 20 to 25 mg. In some embodiments, the one or more maintenance doses contain the compound at a dose amount of from 10 to 20 mg. In some embodiments, the one or more maintenance doses contain the compound at a dose amount of from 15 to 20 mg.

[0169] In some embodiments, the one or more maintenance doses contain the compound at a dose amount of about 20 mg. In some embodiments, the one or more maintenance doses contain the compound at a dose amount of about 25 mg. In some embodiments, the one or more maintenance doses contain the compound at a dose amount of about 30 mg. In some embodiments, the one or more maintenance doses contain the compound at a dose amount of about 35 mg. In some embodiments, the one or more maintenance doses contain the compound at a dose amount of about 40 mg. In some embodiments, the one or more maintenance doses contain the compound at a dose amount of about 45 mg. In some embodiments, the one or more maintenance doses contain the compound at a dose amount of about 50 mg. In some embodiments, the one or more maintenance doses contain the compound at a dose amount of about 55 mg. In some embodiments, the one or more maintenance doses contain the compound at a dose amount of about 60 mg. In some embodiments, the one or more maintenance doses contain the compound at a dose amount of about 65 mg. In some embodiments, the one or more maintenance doses contain the compound at a dose amount effective to reduce seizure frequency and/or improve cognition and/or behavior for over one year of dosing compared to a subject not treated with the compound. In some embodiments, the one or more maintenance doses contain the compound at a dose amount effective to reduce seizure frequency and/or improve cognition and/or behavior for over one year of dosing compared to a subject administered the first dose but not administered the one or more maintenance doses.

[0170] In some embodiments, the method comprises administering at least two maintenance doses. In some embodiments, the method comprises administering at least 3, 4, 5, 6, 7, 8, 9 or 10 maintenance doses. In some embodiments, the method comprises administering 2 maintenance doses. In some embodiments, the method comprises administering 3 maintenance doses. In some embodiments, the method comprises administering 4, 5, 6, 7, 8, 9, or 10 maintenance doses. In some embodiments, the maintenance doses are administered every two, Three, or four months. In some embodiments, the maintenance doses are administered every four months.

[0171] In some embodiments, the one or more maintenance doses contain the compound at a dose amount that is lower than the first dose amount. In some embodiments, the one or more maintenance doses is lower than the first dose following an indication that administration of the first dose is not tolerated. In some embodiments, the one or more maintenance doses is lower than the first dose following an indication that administration of the first dose is effective. In some embodiments, the one or more maintenance doses contain the compound at a dose amount that is at least about 10%, 20%, 30%, 40%, 50%, 60%, 70%, or 80% lower than the first dose amount. In some embodiments, the one or more maintenance doses contain the compound at a dose amount that is at least about 5 mg, 10 mg, 15 mg, 20 mg, 30 mg, 35 mg, 40 mg, or 45 mg lower than the first dose amount. In some embodiments, the one or more maintenance doses contain the compound at a dose amount that is higher than the first dose amount. In some embodiments, the one or more maintenance doses is higher than the first dose following an indication that administration of the first dose is tolerated. In some embodiments, the one or more maintenance doses is higher than the first dose following an indication that administration of the first dose is not effective. In some embodiments, the one or more maintenance doses contain the compound at a dose amount that is at least about 10%, 20%, 30%, 40%, 50%, 60%, 70%, or 80% higher than the first dose amount. In some embodiments, the one or more maintenance doses contain the compound at a dose amount that is at least about 5 mg, 10 mg, 15 mg, 20 mg, 30 mg, 50 mg, or 70 mg higher than the first dose amount.

[0172] In some embodiments, a first maintenance dose of the one or more maintenance doses is administered at least 1, 2, 3, 4, 5, 6, 7, 8, 9, 10, 11, or 12 months after administration of the first dose. In some embodiments, a first maintenance dose of the one or more maintenance doses is administered at least 1, 2, 3, 4, 5, 6, 7, or 8 weeks after administration of the first dose. In some embodiments, a first maintenance dose of the one or more maintenance doses is administered about 4 months after the first dose is administered. In some embodiments, the one or more maintenance doses is administered at least 1, 2, 3, 4, 5, 6, 7, 8, 9, 10, 11, or 12 months after administration of a dose immediately prior. In some embodiments, the one or more maintenance doses is administered about 2 months after administration of a dose immediately prior. In some embodiments, the one or more maintenance doses is administered about 3 months after administration of a dose immediately prior. In some embodiments, the one or more maintenance doses is administered about 4 months after administration of a dose immediately prior. In some embodiments, the one or more maintenance doses is administered about 5 months after administration of a dose immediately prior. In some embodiments, the one or more maintenance doses is administered at least 1, 2, 3, 4, 5, 6, 7, or 8 weeks after administration of a dose immediately prior. In some embodiments, each maintenance dose of the one or more maintenance doses is administered about 4 months after the human subject has been administered a dose immediately prior. In some embodiments, dose frequency is maintained or reduced following an indication that the previous dose is effective. In some embodiments, dose frequency is increased following an indication that the previous dose is not effective.

[0173] In some embodiments, the method comprises administering to the human subject a pharmaceutical composition comprising the compound according to chemical structure (I) or (II), wherein the method comprises administering to the human subject the pharmaceutical composition at a first dose amount of from about 30 to 80 mg and one or more maintenance doses at a dose amount of from about 30 to 50 mg, wherein the one or more maintenance doses contain a dose amount that is different from the first dose amount. In some embodiments, the method comprises administering to the human subject the pharmaceutical composition at a first dose amount of from about 30 to 70 mg and one or more maintenance doses at a dose amount of from about 30 to 50 mg, wherein the one or more maintenance doses contain a dose amount that is different from the first dose amount. In some embodiments, the method comprises administering to the human subject the pharmaceutical composition at a first dose amount of from about 40 to 70 mg and one or more maintenance doses at a dose amount of from about 30 to 45 mg, wherein the one or more maintenance doses contain a dose amount that is different from the first dose amount. In some embodiments, the method comprises administering to the human subject the pharmaceutical composition at a first dose amount of from about 45 to 70 mg and one or more maintenance doses at a dose amount of from about 30 to 45 mg, wherein the one or more maintenance doses contain a dose amount that is different from the first dose amount. In some embodiments, the method comprises administering to the human subject the pharmaceutical composition at a first dose amount of at least 45 mg and one or more maintenance doses at a dose amount of at least 30 mg. In some embodiments, the method comprises administering to the human subject the pharmaceutical composition at a first dose amount of about 45 mg and one or more maintenance doses at a dose amount of about 30 mg. In some embodiments, the method comprises administering to the human subject the pharmaceutical composition at a first dose amount of about 50 mg and one or more maintenance doses at a dose amount of about 35 mg. In some embodiments, the method comprises administering to the human subject the pharmaceutical composition at a first dose amount of about 55 mg and one or more maintenance doses at a dose amount of about 40 mg. In some embodiments, the method comprises administering to the human subject the pharmaceutical composition at a first dose amount of about 60 mg and one or more maintenance doses at a dose amount of about 45 mg. In some embodiments, the method comprises administering to the human subject the pharmaceutical composition at a first dose amount of about 70 mg and one or more maintenance doses at a dose amount of about 30 mg. In some embodiments, the method comprises administering to the human subject the pharmaceutical composition at a first dose amount of about 70 mg and one or more maintenance doses at a dose amount of about 45 mg. In some embodiments, the method comprises administering to the human subject the pharmaceutical composition at a first dose amount of about 70 mg and one or more maintenance doses at a dose amount of from about 30 mg to about 60 mg. In some embodiments, the method comprises administering to the human subject the pharmaceutical composition at a first dose amount of about 70 mg and one or more maintenance doses at a dose amount of from about 30 mg to about 50 mg. In some embodiments, the method comprises administering to the human subject the pharmaceutical composition at a first dose amount of about 70 mg and one or more maintenance doses at a dose amount of from about 30 mg to about 45 mg. In some embodiments, the method comprises administering to the human subject the pharmaceutical composition at a first dose amount of about 70 mg and one or more maintenance doses at a dose amount of from about 30 mg to about 40 mg. In some embodiments, the method comprises administering to the human subject the pharmaceutical composition at a first dose amount of about 70 mg and one or more maintenance doses at a dose amount of from about 30 mg to about 35 mg. The methods disclosed herein can (i) reduce seizure frequency and/or (ii) improve cognition and/or behavior after at least 6 months, 9 months, or 1 year dosing of the maintenance dose as compared to a control, such as observed natural history of the disease.

[0174] In some embodiments, the method as described herein comprises administering to the human subject a pharmaceutical composition comprising the compound according to chemical structure (I), or in some cases, the chemical structure (II), wherein the method comprises administering to the human subject the pharmaceutical composition comprising the compound at a first dose amount of from 30 to 70 mg and one or more maintenance doses, wherein the one or more maintenance doses contain a dose amount that is different from the first dose amount. In some embodiments, the pharmaceutical composition comprising the compound is administered into the intrathecal space of the human subject. In some embodiments, the pharmaceutical composition is administered into the cerebrospinal fluid of the human subject. In some embodiments, the pharmaceutical composition is administered into the brain of the human subject. In some embodiments, the pharmaceutical composition is administered into the cerebrospinal fluid in the brain of the human subject. In some embodiments, the pharmaceutical composition is administered as a bolus injection. In some embodiments, the method comprises administering the pharmaceutical composition as a bolus injection over 1 to 60 minutes, 1 to 50 minutes, 1 to 40 minutes, 1 to 30 minutes, 1 to 20 minutes, 1 to 10 minutes, 1 to 5 minutes, or 1 to 3 minutes. In some embodiments, the method comprises administering the pharmaceutical composition as a bolus injection using a spinal anesthesia needle. In some embodiments, the pharmaceutical composition is administered by infusion with a delivery pump. In some embodiments, the pharmaceutical composition is administered by intracerebroventricular injection. In some embodiments, the pharmaceutical composition is administered by intrathecal injection. In some embodiments, the pharmaceutical composition is administered by lumbar injection.

[0175] In some embodiments, the methods herein provide administering to the human subject a pharmaceutical composition comprising the compound according to chemical structure (I), or in some cases, the chemical structure (II), wherein the pharmaceutical composition comprises the compound at a first dose amount of from 30 to 50 mg and one or more maintenance doses, wherein the one or more maintenance doses contain a dose amount that is different from the first dose amount. In some embodiments, the pharmaceutical composition comprises a pharmaceutically acceptable excipient, carrier or diluent. In some embodiments, the pharmaceutical composition is a solution. In some embodiments, the compound is present in the pharmaceutical composition at a concentration of from 0.1 mg/mL to 250 mg/mL. In some embodiments, the compound is present in the first dose at a concentration of about 0.1 mg/mL, 0.5 mg/mL, 1 mg/mL, 2 mg/mL, 2.5 mg/mL, 3 mg/mL, 4 mg/mL, 5 mg/mL, 6 mg/mL, 7 mg/mL, 8 mg/mL, 9 mg/mL, or 10 mg/mL. In some embodiments, the compound is present in the maintenance dose at a concentration of about 0.1 mg/mL, 0.5 mg/mL, 1 mg/mL, 2 mg/mL, 2.5 mg/mL, 3 mg/mL, 4 mg/mL, 5 mg/mL, 6 mg/mL, 7 mg/mL, 8 mg/mL, 9 mg/mL, 10 mg/mL, 11 mg/mL, 12 mg/mL, 13 mg/mL, 14 mg/mL, 15 mg/mL, 16 mg/mL, 17 mg/mL, 18 mg/mL, 19 mg/mL, or 20 mg/mL.

[0176] In some embodiments, the pharmaceutical composition comprising the first dose is a solution. In some embodiments, the compound is dissolved or suspended in the solution and the first dose has a volume of 5 mL or higher. In some embodiments, the compound is dissolved or suspended in a solution and the first dose has a volume of from 5 to 50 mL. In some embodiments, the compound is dissolved or suspended in a solution and the first dose has a volume of from 5 to 25 mL. In some embodiments, the compound is dissolved or suspended in a solution and the first dose has a volume of from 5 to 10 mL. In some embodiments, the compound is dissolved or suspended in a solution and the first dose has a volume of 5 mL. In some embodiments, the compound is dissolved or suspended in a solution and the first dose has a volume of 6 mL. In some embodiments, the compound is dissolved or suspended in a solution and the first dose has a volume of 7 mL. In some embodiments, the compound is dissolved or suspended in a solution and the first dose has a volume of 8 mL. In some embodiments, the compound is dissolved or suspended in a solution and the first dose has a volume of 9 mL. In some embodiments, the compound is dissolved or suspended in a solution and the first dose has a volume of 10 mL. In some embodiments, the compound is dissolved or suspended in a solution and the first dose has a volume of 11 mL. In some embodiments, the compound is dissolved or suspended in a solution and the first dose has a volume of 12 mL. In some embodiments, the compound is dissolved or suspended in a solution and the first dose has a volume of 13 mL. In some embodiments, the compound is dissolved or suspended in a solution and the first dose has a volume of 14 mL. In some embodiments, the compound is dissolved or suspended in a solution and the first dose has a volume of 15 mL. In some embodiments, the compound is dissolved or suspended in a solution and the first dose has a volume of 17 mL. In some embodiments, the compound is dissolved or suspended in a solution and the first dose has a volume of 20 mL. In some embodiments, the compound is dissolved or suspended in a solution and the first dose has a volume of 25 mL. In some embodiments, the compound is dissolved or suspended in a solution and the first dose has a volume of 30 mL.

[0177] In some embodiments, the pharmaceutical composition comprising the one or more maintenance doses is a solution. In some embodiments, the compound is dissolved or suspended in a solution and each of the one or more maintenance doses has a volume of 10 mL or higher. In some embodiments, the compound is dissolved or suspended in a solution and each of the one or more maintenance doses has a volume of from 10 to 50 mL. In some embodiments, the compound is dissolved or suspended in a solution and the first dose has a volume of from 5 to 25 mL. In some embodiments, the compound is dissolved or suspended in a solution and the first dose has a volume of from 5 to 10 mL. In some embodiments, the compound is dissolved or suspended in a solution and the first dose has a volume of 5 mL. In some embodiments, the compound is dissolved or suspended in a solution and the first dose has a volume of 6 mL. In some embodiments, the compound is dissolved or suspended in a solution and the first dose has a volume of 7 mL. In some embodiments, the compound is dissolved or suspended in a solution and the first dose has a volume of 8 mL. In some embodiments, the compound is dissolved or suspended in a solution and the first dose has a volume of 9 mL. In some embodiments, the compound is dissolved or suspended in a solution and each of the one or more maintenance doses has a volume of 10 mL. In some embodiments, the compound is dissolved or suspended in a solution and the first dose has a volume of 11 mL. In some embodiments, the compound is dissolved or suspended in a solution and the first dose has a volume of 12 mL. In some embodiments, the compound is dissolved or suspended in a solution and the first dose has a volume of 13 mL. In some embodiments, the compound is dissolved or suspended in a solution and the first dose has a volume of 14 mL. In some embodiments, the compound is dissolved or suspended in a solution and each of the one or more maintenance doses has a volume of 15 mL. In some embodiments, the compound is dissolved or suspended in a solution and the first dose has a volume of 17 mL. In some embodiments, the compound is dissolved or suspended in a solution and each of the one or more maintenance doses has a volume of 20 mL. In some embodiments, the compound is dissolved or suspended in a solution and each of the one or more maintenance doses has a volume of 25 mL. In some embodiments, the compound is dissolved or suspended in a solution and each of the one or more maintenance doses has a volume of 30 mL.

[0178] In some embodiments, the pharmaceutical composition is a solution. In some cases, the solution comprises a pharmaceutically acceptable excipient, carrier or diluent. In some embodiments, the pharmaceutical composition comprises from 0.1 mL to 50 mL of a diluent, wherein the compound is solubilized or diluted in the diluent. In some embodiments, the pharmaceutical composition comprises about 0.1, 0.5, 1, 2, 2.5, 3, 4, 5, 6, 7, 8, 9, 10, 11, 12, 13, 14, 15, 16, 17, 18, 19, 20, 25, 30, 35, 40, 45 or 50 mL of the diluent. In some embodiments, the pharmaceutical composition comprises 1 mL to 20 mL of the diluent, 2 mL to 10 mL of the diluent or 1 mL to 5 mL of the diluent. In some embodiments, the diluent comprises a cerebral spinal fluid (CSF) sample from the human subject or an artificial cerebral spinal fluid (aCSF) solution. In some embodiments, the compound is solubilized or diluted in an isotonic solution. In some embodiments, the isotonic solution is a CSF sample from the human subject. In some embodiments, the compound is solubilized or diluted in the pharmaceutical composition in a phosphate-buffered solution with at least pH 5.8. In some embodiments, the compound is solubilized or diluted in the pharmaceutical composition in a phosphate-buffered (pH 6.6-7.6) solution. In some embodiments, the buffer comprises 25-250 mM NaCl, 0.1-20 mM KCl, 0.1-50 mM NaH₂PO₄, 0.1-50 mM NaH₂PO₄, 0.1-50 mM CaCl₂, 0.1-50 mM MgCl₂ or a combination thereof. In some embodiments, the buffer comprises 150 mM NaCl, 3.0 mM KCl, 0.7 mM NaH₂PO₄, 0.3 mM NaH₂PO₄, 0.79 mM MgCl₂, and 1.4 mM CaCl₂. In some embodiments, the buffer comprises 1-100 mM NaHCO₃, 1-100 mM KHCO₃, or a combination thereof. In some embodiments, the buffer comprises carbohydrates. In some embodiments, the buffer comprises D-glucose. In some embodiments, the buffer comprises 1-100 mM D-glucose. In some embodiments, the buffer comprises an antioxidant. In some embodiments, the antioxidant is t-butylhydroxyquinoline (TBHQ), butylated hydroxytoluene (BHT), butylated hydroxyanisole (BHA), vitamin E, or any combination thereof. In some embodiments, the pharmaceutical formulation does not comprise a preservative.

### Dravet Syndrome and Other Related Diseases

[0179] The terms “condition,” “diseases,” and “disorders” are used herein interchangeably in its broadest sense and include susceptibilities. In some embodiments, the disease or condition is Dravet Syndrome. In some embodiments, the method reduces or ameliorates at least one symptom of Dravet Syndrome in the human subject. In some embodiments, the symptom of Dravet Syndrome is a seizure. In some embodiments, the administration reduces or ameliorates seizure frequency, seizure intensity, or seizure duration.

[0180] Dravet syndrome (DS), otherwise known as severe myoclonic epilepsy of infancy (SMEI), is an epileptic encephalopathy presenting in the first year of life. Dravet syndrome is an increasingly recognized epileptic encephalopathy in which the clinical diagnosis is supported by the finding of sodium channel gene mutations in approximately 70-80% of patients. DS is a severe and progressive developmental and epileptic encephalopathy that is characterized by high seizure frequency and severity, intellectual disability, and a high risk of sudden unexpected death in epilepsy. Mutations of ion channel genes play a major role in the pathogenesis of a range of epilepsy syndromes, resulting in some epilepsies being regarded as channelopathies. Voltage-gated sodium channels (VGSCs) play an essential role in neuronal excitability; therefore, it is not surprising that many mutations associated with DS have been identified in the gene encoding a VGSC subunit. The disease is described by, e.g., Mulley, et al., 2005, and the disease description at OMIM #607208 (Online Mendelian Inheritance in Man, Johns Hopkins University, 1966-2015), both incorporated by reference herein.

[0181] Between 70% and 80% of patients carry sodium channel al subunit gene (SCN1A) abnormalities, and truncating mutations account for about 40%, and have a significant correlation with an earlier age of seizures onset. Sequencing mutations are found in about 70% of cases and comprise truncating (40%) and missense mutations (40%) with the remaining being splice-site changes. Most mutations are de novo, but familial mutations occur in 5-10% of cases and are usually missense in nature. The remaining SCN1A mutations comprise splice-site and missense mutations, most of which fall into the pore-forming region of the sodium channel. At present, over 500 mutations have been associated with DS and are randomly distributed along the gene (Mulley, et al., Neurol. 2006, 67, 1094-1095).

[0182] The SCN1A gene is located in the cluster of sodium channel genes on human chromosome 2q24 and encodes the α-pore forming subunits known as Na_{V}1.1 of the neuronal voltage-gated sodium channel. The SCN1A gene spans approximately 100 kb of genomic DNA and comprises 26 exons. The Na_{V}1.1 protein consists of four domains, each with six-transmembrane segments. Two splice variants have been identified that result in a long and short isoform that differ in the presence or absence of 11 amino acids in the cytoplasmic loop between domains 1 and 2, in exon 11 (Miller, et al., 1993-2015, and Mulley, et al., 2005, 25, 535-542, of which entire content is incorporated herein by reference). In some aspects, the variants or homologs have at least 80%, 85%, 90%, 95%, 96%, 97%, 98%, 99% or 100% nucleotide sequence identity across the whole sequence or a portion of the sequence (e.g., a 50, 100, 150 or 200 continuous nucleotide portion) compared to a naturally occurring SCN1A gene. In some embodiments, the SCN1A gene is substantially identical to the gene identified by the Ensembl reference number ENSG00000144285 or a variant or homolog having substantial identity thereto.

[0183] Alternative splicing events in SCN1A gene can lead to non-productive mRNA transcripts which in turn can lead to aberrant protein expression, and therapeutic agents which can target the alternative splicing events in SCN1A gene can modulate the expression level of functional proteins in DS patients and/or inhibit aberrant protein expression. Such therapeutic agents can be used to treat a condition characterized by Na_{V}1.1 protein deficiency.

[0184] One of the alternative splicing events that can lead to non-productive mRNA transcripts is the inclusion of an extra exon in the mRNA transcript that can induce nonsense-mediated mRNA decay. The present disclosure provides compositions and methods for modulating alternative splicing of SCN1A to increase the production of protein-coding mature mRNA, and thus, translated functional Na_{V}1.1 protein. These compositions and methods include compounds that can cause exon skipping and promote constitutive splicing of SCN1A pre-mRNA. In various embodiments, functional Na_{V}1.1 protein can be increased using the methods of the disclosure to treat a condition characterized by Na_{V}1.1 protein deficiency.

[0185] In some cases, the disease or condition is SMEB.

[0186] In some cases, the disease or condition is GEFS+.

[0187] In some cases, the disease or condition is a Febrile seizure (e.g., Febrile seizures, familial, 3A).

[0188] In some cases, the disease or condition is autism (also known as autism spectrum disorder or ASD).

[0189] In some cases, the disease or condition is migraine (e.g., migraine, familial hemiplegic, 3).

[0190] In some cases, the disease or condition is Alzheimer's disease.

[0191] In some embodiments, the disease or condition is SMEB. In some embodiments, the disease or condition is GEFS+. In some embodiments, the disease or condition is a Febrile seizure (e.g., Febrile seizures, familial, 3A). In some embodiments, the disease or condition is autism (also known as autism spectrum disorder or ASD). In some embodiments, the disease or condition is migraine (e.g., migraine, familial hemiplegic, 3). In some embodiments, the disease or condition is Alzheimer's disease. In some embodiments, the disease or condition is SCN2A encephalopathy. In some embodiments, the disease or condition is SCN8A encephalopathy. In some embodiments, the disease or condition is SCN5A arrhythmia.

[0192] In some embodiments, the disease or condition is characterized by a mutation in Na_{V}1.1 (a protein encoded by the SCN1A gene). “Na_{V}1.1,” also known as the sodium channel, voltage-gated, type I, alpha subunit (SCN1A), as used herein, refers to a protein which in humans is encoded by the SCN1A gene. Na_{V}1.1 includes any of the recombinant or naturally occurring forms of Na_{V}1.1 protein or variants or homologs thereof that maintain Na_{V}1.1 activity, (e.g., within at least 50%, 80%, 90%, 95%, 96%, 97%, 98%, 99% or 100% activity compared to Na_{V}1.1). In some aspects, the variants or homologs have at least 80%, 85%, 90%, 95%, 96%, 97%, 98%, 99% or 100% amino acid sequence identity across the whole sequence or a portion of the sequence (e.g., a 50, 100, 150 or 200 continuous amino acid portion) compared to a naturally occurring Na_{V}1.1 protein. In some embodiments, the Na_{V}1.1 protein is substantially identical to the protein identified by the UniProt reference number P35498 or a variant or homolog having substantial identity thereto.

[0193] In some instances, the mutation is a loss-of-function mutation in Naᵥ1.1. In some cases, the loss-of-function mutation in Na_{V}1.1 comprises one or more mutations that decreases or impairs the function of Na_{V}1.1 (e.g., by 10%, 20%, 30%, 40%, 50%, 60%, 70%, 80%, 90%, 95%, or more) relative to the function of a wild-type Naᵥ1.1. In some cases, the loss-of-function mutation in Naᵥ1.1 comprises one or more mutations that result in a disease phenotype. Exemplary loss-of-function mutations include, but are not limited to, R859C, T875M, V1353L, I1656M, R1657C, A1685V, M1841T, and R1916G.

[0194] In other instances, the mutation is a gain-of-function mutation in Na_{V}1.1. In such cases, the gain-of-function mutation comprises one or more mutations that prolongs activation of Naᵥ1.1 (e.g., by 10%, 20%, 30%, 40%, 50%, 60%, 70%, 80%, 90%, 95%, or more) relative to the function of a wild-type Naᵥ1.1. In such cases, the gain-of-function mutation in Naᵥ1.1 comprises one or more mutations that result in a disease phenotype. Exemplary gain-of-function mutations include, but are not limited to, D188V, W1204R, R1648H, and D1866Y.

[0195] In some embodiments, the disease or condition is an encephalopathy. In some cases, the encephalopathy is characterized by a loss-of-function mutation in Na_{V}1.1.

[0196] In some embodiments, the encephalopathy is epileptic encephalopathy. Exemplary epileptic encephalopathies include, but are not limited to, Dravet Syndrome (DS) (also known as severe myoclonic epilepsy of infancy or SMEI); severe myoclonic epilepsy of infancy (SMEI)-borderland (SMEB); Febrile seizure (FS); epilepsy, generalized, with febrile seizures plus (GEFS+); epileptic encephalopathy, early infantile, 13; cryptogenic generalized epilepsy; cryptogenic focal epilepsy; myoclonic-astatic epilepsy; Lennox-Gastaut syndrome; West syndrome; idiopathic spasms; early myoclonic encephalopathy; progressive myoclonic epilepsy; alternating hemiplegia of childhood; unclassified epileptic encephalopathy; sudden unexpected death in epilepsy (SUDEP); early infantile SCN1A encephalopathy; early infantile epileptic encephalopathy (EIEE); autism; malignant migrating partial seizures of infancy; or sick sinus syndrome 1. In some embodiments, the disease or condition is epileptic encephalopathy, optionally selected from Dravet Syndrome (DS) (also known as severe myoclonic epilepsy of infancy or SMEI); severe myoclonic epilepsy of infancy (SMEI)-borderland (SMEB); Febrile seizure (FS); epilepsy, generalized, with febrile seizures plus (GEFS+); epileptic encephalopathy, early infantile, 13; cryptogenic generalized epilepsy; cryptogenic focal epilepsy; myoclonic-astatic epilepsy; Lennox-Gastaut syndrome; West syndrome; idiopathic spasms; early myoclonic encephalopathy; progressive myoclonic epilepsy; alternating hemiplegia of childhood; unclassified epileptic encephalopathy; sudden unexpected death in epilepsy (SUDEP); and sick sinus syndrome 1.

[0197] In some instances, GEFS+ is epilepsy, generalized, with febrile seizures plus, type 2.

[0198] In some instances, the Febrile seizure is Febrile seizures, familial, 3A.

[0199] In some instances, SMEB is SMEB without generalized spike wave (SMEB-SW), SMEB with-out myoclonic seizures (SMEB-M), SMEB lacking more than one feature of SMEI (SMEB-O), or intractable childhood epilepsy with generalized tonic-clonic seizures (ICEGTC).

[0200] In some embodiments, GEFS+ is epilepsy, generalized, with febrile seizures plus, type 2. In some embodiments, the Febrile seizure is Febrile seizures, familial, 3A. In some embodiments, SMEB is SMEB without generalized spike wave (SMEB-SW), SMEB without myoclonic seizures (SMEB-M), SMEB lacking more than one feature of SMEI (SMEB-O), or intractable childhood epilepsy with generalized tonic-clonic seizures (ICEGTC).

[0201] In some embodiments, the diseases or conditions characterized by a loss-of-function mutation in Na_{V}1.1 include, but are not limited to, Dravet Syndrome (DS) (also known as SMEI); severe myoclonic epilepsy of infancy (SMEI)-borderland (SMEB); Febrile seizure (FS); epilepsy, generalized, with febrile seizures plus (GEFS+); epileptic encephalopathy, early infantile, 13; cryptogenic generalized epilepsy; cryptogenic focal epilepsy; myoclonic-astatic epilepsy; Lennox-Gastaut syndrome; West syndrome; idiopathic spasms; early myoclonic encephalopathy; progressive myoclonic epilepsy; alternating hemiplegia of childhood; unclassified epileptic encephalopathy; sudden unexpected death in epilepsy (SUDEP); sick sinus syndrome 1; early infantile SCN1A encephalopathy; early infantile epileptic encephalopathy (EIEE); autism; or malignant migrating partial seizures of infancy.

[0202] In related embodiments, the method is a method of using a compound to decrease the expression of a protein or functional RNA. In some embodiments, a compound is used to decrease the expression of Na_{V}1.1 protein in cells of a subject having an NMD-inducing exon (NIE) containing pre-mRNA encoding Na_{V}1.1 protein. In some embodiments, the human subject has a gain-of-function mutation in Na_{V}1.1, e.g., migraine. In some embodiments, a compound is used to decrease the expression of Na_{V}1.1 protein in cells of a subject, the human subject has a gain-of-function mutation in Na_{V}1.1, e.g., migraine, familial hemiplegic, 3.

[0203] In some embodiments, the level of mRNA encoding Na_{V}1.1 protein is decreased 1.1 to 10-fold, when compared to the amount of mRNA encoding Na_{V}1.1 protein that is produced in a control cell, e.g., one that is not treated with the antisense oligomer or one that is treated with an antisense oligomer that does not bind to the targeted portion of the SCN1A NIE containing pre-mRNA.

[0204] In some embodiments, the disease or condition is a Na_{V}1.1 genetic epilepsy. The Na_{V}1.1 genetic epilepsy can include a loss-of-function mutation in Naᵥ1.1 or a gain-of-function mutation in Naᵥ1.1. In some cases, the Na_{V}1.1 genetic epilepsy includes one or more hereditary mutations. In other cases, the Na_{V}1.1 genetic epilepsy includes one or more de novo mutations. In some cases, the Na_{V}1.1 genetic epilepsy includes Dravet Syndrome (DS) (also known as severe myoclonic epilepsy of infancy or SMEI); severe myoclonic epilepsy of infancy (SMEI)-borderland (SMEB); Febrile seizure (FS); epilepsy, generalized, with febrile seizures plus (GEFS+); epileptic encephalopathy, early infantile, 13; cryptogenic generalized epilepsy; cryptogenic focal epilepsy; myoclonic-astatic epilepsy; Lennox-Gastaut syndrome; West syndrome; idiopathic spasms; early myoclonic encephalopathy; progressive myoclonic epilepsy; alternating hemiplegia of childhood; unclassified epileptic encephalopathy; early infantile SCN1A encephalopathy; early infantile epileptic encephalopathy (EIEE); sudden unexpected death in epilepsy (SUDEP); or malignant migrating partial seizures of infancy. In some cases, the Naᵥ1.1 genetic epilepsy associated with a loss-of-function mutation in Naᵥ1.1 includes Dravet Syndrome (DS) (also known as severe myoclonic epilepsy of infancy or SMEI); severe myoclonic epilepsy of infancy (SMEI)-borderland (SMEB); Febrile seizure (FS); epilepsy, generalized, with febrile seizures plus (GEFS+); epileptic encephalopathy, early infantile, 13; cryptogenic generalized epilepsy; cryptogenic focal epilepsy; myoclonic-astatic epilepsy; Lennox-Gastaut syndrome; West syndrome; idiopathic spasms; early myoclonic encephalopathy; progressive myoclonic epilepsy; alternating hemiplegia of childhood; unclassified epileptic encephalopathy; early infantile SCN1A encephalopathy; early infantile epileptic encephalopathy (EIEE); sudden unexpected death in epilepsy (SUDEP); malignant migrating partial seizures of infancy.

[0205] In some embodiments, the disease or condition is associated with a haploinsufficiency of the SCN1A gene. Exemplary diseases or conditions associated with a haploinsufficiency of the SCN1A gene include, but are not limited to, Dravet Syndrome (DS) (also known as SMEI); severe myoclonic epilepsy of infancy (SMEI)-borderland (SMEB); Febrile seizure (FS); epilepsy, generalized, with febrile seizures plus (GEFS+); epileptic encephalopathy, early infantile, 13; cryptogenic generalized epilepsy; cryptogenic focal epilepsy; myoclonic-astatic epilepsy; Lennox-Gastaut syndrome; West syndrome; idiopathic spasms; early myoclonic encephalopathy; progressive myoclonic epilepsy; alternating hemiplegia of childhood; unclassified epileptic encephalopathy; sudden unexpected death in epilepsy (SUDEP); sick sinus syndrome 1; early infantile SCN1A encephalopathy; early infantile epileptic encephalopathy (EIEE); or malignant migrating partial seizures of infancy. In some cases, the disease or condition is Dravet Syndrome (DS) (also known as SMEI); severe myoclonic epilepsy of infancy (SMEI)-borderland (SMEB); Febrile seizure (FS); epilepsy, generalized, with febrile seizures plus (GEFS+); epileptic encephalopathy, early infantile, 13; cryptogenic generalized epilepsy; cryptogenic focal epilepsy; myoclonic-astatic epilepsy; Lennox-Gastaut syndrome; West syndrome; idiopathic spasms; early myoclonic encephalopathy; progressive myoclonic epilepsy; alternating hemiplegia of childhood; unclassified epileptic encephalopathy; sudden unexpected death in epilepsy (SUDEP); sick sinus syndrome 1; early infantile SCN1A encephalopathy; early infantile epileptic encephalopathy (EIEE); or malignant migrating partial seizures of infancy. In some cases, the disease or condition is Dravet Syndrome (DS).

[0206] The term “epilepsy,” as used herein, refers to a group of neurological disorders characterized by recurrent epileptic seizures. “Epileptic seizures,” as used herein, refer to episodes that may vary from brief and nearly undetectable periods to long periods of vigorous shaking. Exemplary types of seizure include, but are not limited to, convulsive, non-convulsive, focal, and generalized seizures. Exemplary types of generalized seizures include, but are not limited to, tonic-clonic, tonic, clonic, myoclonic, absence, and atonic seizures.

[0207] In some embodiments, the disease or condition is characterized by a gain-of-function mutation in Naᵥ1.1. Exemplary diseases or conditions associated with a gain-of-function mutation in Na_{V}1.1 include, but are not limited to, migraine. In some instances, the disease or condition characterized by a gain-of-function mutation in Naᵥ1.1 is migraine. In some embodiments, the migraine is migraine, familial hemiplegic, 3.

[0208] In some embodiments, the method is a method of decreasing the expression of the Na_{V}1.1 protein by cells of a subject having a NIE containing pre-mRNA encoding the Na_{V}1.1 protein, and wherein the human subject has a gain-of-function mutation in Naᵥ1.1. In such an embodiment, the human subject has an allele from which the Na_{V}1.1 protein is produced in an elevated amount or an allele encoding a mutant SCN1A that induces increased activity of Na_{V}1.1 in the cell. In some embodiments, the increased activity of Na_{V}1.1 is characterized by a prolonged or near persistent sodium current mediated by the mutant Naᵥ1.1 channel, a slowing of fast inactivation, a positive shift in steady-state inactivation, higher channel availability during repetitive stimulation, increased non-inactivated depolarization-induced persistent sodium currents, delayed entry into inactivation, accelerated recovery from fast inactivation, and/or rescue of folding defects by incubation at lower temperature or co-expression of interacting proteins. In any of these embodiments, the antisense oligomer binds to a targeted portion of the NIE containing pre-mRNA transcribed from the second allele, thereby inhibiting or blocking exon skipping of the pseudo-exon from the pre-mRNA, and causing a decrease in the level of mature mRNA encoding functional Na_{V}1.1 protein, and a decrease in the expression of the Na_{V}1.1 protein in the cells of the human subject.

### Compositions

[0209] In some embodiments, the ASO provided herein comprises a sequence with at least 83%, 88%, 94% or 100% sequence identity to any one of SEQ ID NOs: 21-67, 210-256 or 304-1099. In some embodiments, the ASO consists of a sequence with at least 83%, 88%, 94% or 100% sequence identity to any one of SEQ ID NOs: 21-67, 210-256 or 304-1099. In some embodiments, the ASO comprises a sequence with at least 83%, 88%, 94% or 100% sequence identity to any one of the sequences listed in listed in Tables 4A, 4B, 5A, 5B, 6A, 6B, 7, 8A, and 8B. In some embodiments, the ASO consists of a sequence with at least 83%, 88%, 94% or 100% sequence identity to any one of the sequences listed in listed in Tables 4A, 4B, 5A, 5B, 6A, 6B, 7, 8A, and 8B.

[0210] In some embodiments, the ASO comprises a sequence with at least 60%, 65%, 66%, 67%, 68%, 69%, 70%, 71%, 72%, 73%, 74%, 75%, 76%, 77%, 78%, 79%, 80%, 81%, 82%, 83%, 884%, 85%, 86%, 87%, 88%, 89%, 90%, 91%, 92%, 93%, 94%, 95%, 96%, 97%, 98%, 99%, 99.5%, 99.8%, 99.9%, or 100% sequence identity to any one of SEQ ID NOs: 21-67, 210-256 or 304-1099. In some embodiments, the ASO consists of a sequence with at least 60%, 65%, 66%, 67%, 68%, 69%, 70%, 71%, 72%, 73%, 74%, 75%, 76%, 77%, 78%, 79%, 80%, 81%, 82%, 83%, 884%, 85%, 86%, 87%, 88%, 89%, 90%, 91%, 92%, 93%, 94%, 95%, 96%, 97%, 98%, 99%, 99.5%, 99.8%, 99.9%, or 100% sequence identity to any one of SEQ ID NOs: 21-67, 210-256 or 304-1099. In some embodiments, the ASO comprises a sequence with at least 60%, 65%, 66%, 67%, 68%, 69%, 70%, 71%, 72%, 73%, 74%, 75%, 76%, 77%, 78%, 79%, 80%, 81%, 82%, 83%, 884%, 85%, 86%, 87%, 88%, 89%, 90%, 91%, 92%, 93%, 94%, 95%, 96%, 97%, 98%, 99%, 99.5%, 99.8%, 99.9%, or 100% sequence identity to any one of the sequences listed in listed in Tables 4A, 4B, 5A, 5B, 6A, 6B, 7, 8A, and 8B. In some embodiments, the ASO consists of a sequence with at least 60%, 65%, 66%, 67%, 68%, 69%, 70%, 71%, 72%, 73%, 74%, 75%, 76%, 77%, 78%, 79%, 80%, 81%, 82%, 83%, 884%, 85%, 86%, 87%, 88%, 89%, 90%, 91%, 92%, 93%, 94%, 95%, 96%, 97%, 98%, 99%, 99.5%, 99.8%, 99.9%, or 100% sequence identity to any one of the sequences listed in listed in Tables 4A, 4B, 5A, 5B, 6A, 6B, 7, 8A, and 8B.

[0211] In some embodiments, the ASO as described herein comprises at least one modified sugar moiety.

[0212] In some embodiments, the ASO as described herein comprises T-methoxyethyl sugar moiety. In some embodiments, the T-methoxyethyl sugar moiety is a T-2′-methoxyethyl sugar moiety. In some embodiments, the ASO as described herein comprises a 2′-O-methoxyethyl moiety. In some embodiments, the ASO as described herein comprises a thymidine comprising a 2′-O-methoxyethyl moiety. In some embodiments, each nucleobase of the ASO as described herein comprises a 2′-O-methoxyethyl moiety.

[0213] In some embodiments, the ASO as described herein consists of from 8 to 50 nucleobases. In some embodiments, the ASO as described herein consists of from 16 to 20 nucleobases. In some embodiments, the ASO as described herein consists of from 12 to 20 nucleobases. In some embodiments, the ASO as described herein consists of from 8 to 20 nucleobases.

[0214] In some embodiments, the ASO as described herein consists of from 5 to 100, from 6 to 100, from 7 to 100, from 8 to 100, from 9 to 100, from 10 to 100, from 11 to 100, from 12 to 100, from 13 to 100, from 14 to 100, from 15 to 100, from 16 to 100, from 17 to 100, from 18 to 100, from 19 to 100, from 20 to 100, from 21 to 100, from 22 to 100, from 23 to 100, from 24 to 100, from 25 to 100, from 30 to 100, from 35 to 100, from 40 to 100, from 45 to 100, from 50 to 100, from 55 to 100, from 60 to 100, from 65 to 100, from 70 to 100, from 75 to 100, from 80 to 100, from 85 to 100, or from 90 to 100 nucleobases. In some embodiments, the ASO as described herein consists of from 5 to 100, 5 to 95, 5 to 90, 5 to 85, 5 to 80, 5 to 75, 5 to 70, 5 to 65, 5 to 60, 5 to 55, 5 to 50, 5 to 45, 5 to 40, 5 to 35, 5 to 30, 5 to 25, 5 to 20, 5 to 15, or 5 to 10 nucleobases. In some embodiments, the ASO as described herein consists of from 8 to 50, from 8 to 45, from 8 to 40, from 8 to 35, from 8 to 30, from 8 to 29, from 8 to 28, from 8 to 27, from 8 to 26, from 8 to 25, from 8 to 24, from 8 to 23, from 8 to 22, from 8 to 21, from 8 to 20, from 8 to 19, from 8 to 18, from 8 to 17, or from 8 to 16 nucleobases. In some embodiments, the ASO as described herein consists of from 9 to 20, from 10 to 20, from 11 to 20, from 12 to 20, from 13 to 20, from 14 to 20, from 15 to 20, from 16 to 20, from 17 to 20, or from 18 to 20 nucleobases. In some embodiments, the ASO as described herein consists of 5, 6, 7, 8, 9, 10, 11, 12, 13, 14, 15, 16, 17, 18, 19, 20, 21, 22, 23, 24, 25, 26, 27, 28, 29, 30, 31, 32, 33, 34, 35, 36, 37, 38, 39, or 40 nucleobases.

[0215] In some embodiments, the ASO as described herein comprises a 5′-methylcytosine (5′-MeC). In some embodiments, each cytosine of the ASO as described herein is a 5′-methylcytosine (5′-MeC).

[0216] In some embodiments, the ASO as described herein comprises a phosphorothioate linkage. In some embodiments, each internucleoside linkage of the ASO as described herein is a phosphorothioate linkage.

[0217] In some embodiments, the ASO as described herein comprises a locked nucleic acid (LNA).

[0218] In some embodiments, the ASO as described herein comprises least 1, 2, 3, 4, 5, 6, 7, 8, 9, 10, 11, 12, 13, 14, 15, 16, 17, 18, 19, or 20 LNAs. In some embodiments, the ASO as described herein comprises 1 to 20, 1 to 19, 1 to 18, 1 to 17, 1 to 16, 1 to 15, 1 to 14, 1 to 13, 1 to 12, 1 to 11, 1 to 10, 1 to 9, 1 to 8, 1 to 7, 1 to 6, 1 to 5, 1 to 4, 1 to 3, or 1 to 2 LNAs. In some embodiments, the ASO as described herein comprises 1, 2, 3, 4, 5, 6, 7, 8, 9, 10, 11, 12, 13, 14, 15, 16, 17, 18, 19, or 20 LNAs.

[0219] In some embodiments, 5′ end nucleotide of the ASO as described herein is an LNA. In some embodiments, 3′ end nucleotide of the ASO as described herein is an LNA. In some embodiments, 5′ and 3′ end nucleotides of the ASO as described herein are LNAs.

### ASO (Antisense Oligomer)

[0220] Provided herein is a composition comprising a compound that is an antisense oligomer that induces exon skipping by binding to a targeted portion of a SCN1A NIE containing pre-mRNA. As used herein, the terms “ASO” and “antisense oligomer” are used interchangeably and refer to an oligomer such as a polynucleotide, comprising nucleobases that hybridizes to a target nucleic acid (e.g., a SCN1A NIE containing pre-mRNA) sequence by Watson-Crick base pairing or wobble base pairing (G-U). The ASO may have exact sequence complementary to the target sequence or near complementarity (e.g., sufficient complementarity to bind the target sequence and enhancing splicing at a splice site). ASOs are designed so that they bind (hybridize) to a target nucleic acid (e.g., a targeted portion of a pre-mRNA transcript) and remain hybridized under physiological conditions. Typically, if they hybridize to a site other than the intended (targeted) nucleic acid sequence, they hybridize to a limited number of sequences that are not a target nucleic acid (to a few sites other than a target nucleic acid). Design of an ASO can take into consideration the occurrence of the nucleic acid sequence of the targeted portion of the pre-mRNA transcript or a sufficiently similar nucleic acid sequence in other locations in the genome or cellular pre-mRNA or transcriptome, such that the likelihood the ASO will bind other sites and cause “off-target” effects is limited. Any antisense oligomers known in the art, for example in PCT Application No. PCT/US2014/054151, published as WO 2015/035091, titled “Reducing Nonsense-Mediated mRNA Decay,” incorporated by reference herein, can be used to practice the methods described herein.

[0221] In some embodiments, ASOs “specifically hybridize” to or are “specific” to a target nucleic acid or a targeted portion of a NIE containing pre-mRNA. Typically, such hybridization occurs with a Tₘ substantially greater than 37° C., preferably at least 50° C., and typically between 60° C., to approximately 90° C. Such hybridization preferably corresponds to stringent hybridization conditions. At a given ionic strength and pH, the Tₘ is the temperature at which 50% of a target sequence hybridizes to a complementary oligonucleotide.

[0222] Oligomers, such as oligonucleotides, are “complementary” to one another when hybridization occurs in an antiparallel configuration between two single-stranded polynucleotides. A double-stranded polynucleotide can be “complementary” to another polynucleotide if hybridization can occur between one of the strands of the first polynucleotide and the second. Complementarity (the degree to which one polynucleotide is complementary with another) is quantifiable in terms of the proportion (e.g., the percentage) of bases in opposing strands that are expected to form hydrogen bonds with each other, according to generally accepted base-pairing rules. The sequence of an antisense oligomer (ASO) need not be 100% complementary to that of its target nucleic acid to hybridize. In some embodiments, ASOs can comprise at least 70%, at least 75%, at least 80%, at least 85%, at least 90%, at least 95%, at least 96%, at least 97%, at least 98%, or at least 99% sequence complementarity to a target region within the target nucleic acid sequence to which they are targeted. For example, an ASO in which 18 of 20 nucleobases of the oligomeric compound are complementary to a target region, and would therefore specifically hybridize, would represent 90 percent complementarity. In this example, the remaining non-complementary nucleobases may be clustered together or interspersed with complementary nucleobases and need not be contiguous to each other or to complementary nucleobases. Percent complementarity of an ASO with a region of a target nucleic acid can be determined routinely using BLAST programs (basic local alignment search tools) and PowerBLAST programs known in the art (Altschul, et al., J. Mol. Biol., 1990, 215, 403-410; Zhang and Madden, Genome Res., 1997, 7, 649-656, of which entire content is incorporated herein by reference).

[0223] An ASO need not hybridize to all nucleobases in a target sequence and the nucleobases to which it does hybridize may be contiguous or noncontiguous. ASOs may hybridize over one or more segments of a pre-mRNA transcript, such that intervening or adjacent segments are not involved in the hybridization event (e.g., a loop structure or hairpin structure may be formed). In some embodiments, an ASO hybridizes to noncontiguous nucleobases in a target pre-mRNA transcript. For example, an ASO can hybridize to nucleobases in a pre-mRNA transcript that are separated by one or more nucleobase(s) to which the ASO does not hybridize.

[0224] In some cases, an ASO described herein is all-P-ambo-2′-O-(2-methoxyethyl)-P-thioadenylyl-(3′→5′)-2′-O-(2-methoxyethyl)-P-thioguanylyl-(3′→5′)-2′-O-(2-methoxyethyl)-5-methyl-P-thiouridylyl-(3′→5′)-2′-O-(2-methoxyethyl)-5-methyl-P-thiouridylyl-(3′→5′)-2′-O-(2-methoxyethyl)-P-thioguanylyl-(3′→5′)-2′-O-(2-methoxyethyl)-P-thioguanylyl-(3′→5′)-2′-O-(2-methoxyethyl)-P-thioadenylyl-(3′→5′)-2′-O-(2-methoxyethyl)-P-thioguanylyl-(3′→5′)-2′-O-(2-methoxyethyl)-5-methyl-P-thiocytidylyl-(3′→5′)-2′-O-(2-methoxyethyl)-P-thioadenylyl-(3′→5′)-2′-O-(2-methoxyethyl)-P-thioadenylyl-(3′→5′)-2′-O-(2-methoxyethyl)-P-thioguanylyl-(3′→5′)-2′-O-(2-methoxyethyl)-P-thioadenylyl-(3′→5′)-2′-O-(2-methoxyethyl)-5-methyl-P-thiouridylyl-(3′→5′)-2′-O-(2-methoxyethyl)-5-methyl-P-thiouridylyl-(3′→5′)-2′-O-(2-methoxyethyl)-P-thioadenylyl-(3′→5′)-2′-O-(2-methoxyethyl)-5-methyl-P-thiouridylyl-(3′→5′)-2′-O-(2-methoxyethyl)-5-methylcytidine (SEQ ID NO: 1100), or a salt thereof.

[0225] In some cases, an ASO described herein is a sodium salt of all-P-ambo-2′-O-(2-methoxyethyl)-P-thioadenylyl-(3′→5′)-2′-O-(2-methoxyethyl)-P-thioguanylyl-(3′→5′)-2′-O-(2-methoxyethyl)-5-methyl-P-thiouridylyl-(3′→5′)-2′-O-(2-methoxyethyl)-5-methyl-P-thiouridylyl-(3′→5′)-2′-O-(2-methoxyethyl)-P-thioguanylyl-(3′→5′)-2′-O-(2-methoxyethyl)-P-thioguanylyl-(3′→5′)-2′-O-(2-methoxyethyl)-P-thioadenylyl-(3′→5′)-2′-O-(2-methoxyethyl)-P-thioguanylyl-(3′→5′)-2′-O-(2-methoxyethyl)-5-methyl-P-thiocytidylyl-(3′→5′)-2′-O-(2-methoxyethyl)-P-thioadenylyl-(3′→5′)-2′-O-(2-methoxyethyl)-P-thioadenylyl-(3′→5′)-2′-O-(2-methoxyethyl)-P-thioguanylyl-(3′→5′)-2′-O-(2-methoxyethyl)-P-thioadenylyl-(3′→5′)-2′-O-(2-methoxyethyl)-5-methyl-P-thiouridylyl-(3′→5′)-2′-O-(2-methoxyethyl)-5-methyl-P-thiouridylyl-(3′→5′)-2′-O-(2-methoxyethyl)-P-thioadenylyl-(3′→5′)-2′-O-(2-methoxyethyl)-5-methyl-P-thiouridylyl-(3′→5′)-2′-O-(2-methoxyethyl)-5-methylcytidine (SEQ ID NO: 1100).

[0226] In some cases, a compound (e.g., an ASO) described herein is compound (I) having the structure depicted in formula (I) (free acid) (SEQ ID NO: 1100):

[chemical structure]

or a salt thereof.

[0227] In some cases, a compound (e.g., an ASO) described herein is compound (II) having the structure depicted in formula (II) (sodium salt) (SEQ ID NO: 1100):

[chemical structure]

[0228] In any of the structural formulae (graphic representation of a chemical compound) presented herein, where two curved lines and a straight line in between them are used to connect a phosphorus atom (“P”) and an oxygen atom (“O”), the two curved line and the straight line therebetween should be seen as a single integral segment, representing the covalent bond between the phosphorus atom and the oxygen atom, which is part of a backbone linkage (e.g., phosphodiester linkage or phosphorothioate linkage) between two neighboring nucleotides. Any of the vertices (corners) in any of those structural formulae where a curved line and a straight line join does not represent carbon atom or presence of —CH2- at the relevant location in the compound the structural formula represents.

[0229] The compounds described herein (e.g., compound (I) or a salt thereof, or compound (II)) comprise nucleobases that are complementary to nucleobases present in a targeted portion of a NIE containing pre-mRNA. The term ASO embodies oligonucleotides and any other oligomeric molecule that comprises nucleobases capable of hybridizing to a complementary nucleobase on a target mRNA but does not comprise a sugar moiety, such as a peptide nucleic acid (PNA). The ASOs may comprise naturally occurring nucleotides, nucleotide analogs, modified nucleotides, or any combination of two or three of the preceding. The term “naturally occurring nucleotides” includes deoxyribonucleotides and ribonucleotides. The term “modified nucleotides” includes nucleotides with modified or substituted sugar groups and/or having a modified backbone. In some embodiments, all of the nucleotides of the ASO are modified nucleotides. Chemical modifications of ASOs or components of ASOs that are compatible with the methods and compositions described herein will be evident to one of skill in the art and can be found, for example, in U.S. Pat. No. 8,258,109 B2, U.S. Pat. No. 5,656,612, U.S. Patent Publication No. 2012/0190728, and Dias and Stein, Mol. Cancer Ther. 2002, 347-355, herein incorporated by reference in their entirety.

[0230] One or more nucleobases of an ASO (e.g., compound (I) or a salt thereof, or compound (II)) may be any naturally occurring, unmodified nucleobase such as adenine, guanine, cytosine, thymine and uracil, or any synthetic or modified nucleobase that is sufficiently similar to an unmodified nucleobase such that it is capable of hydrogen bonding with a nucleobase present on a target pre-mRNA. Examples of modified nucleobases include, without limitation, hypoxanthine, xanthine, 7-methylguanine, 5,6-dihydrouracil, 5-methylcytosine, and 5-hydroxymethoylcytosine.

[0231] The compounds described herein (e.g., compound (I) or a salt thereof, or compound (II)) also comprise a backbone structure that connects the components of an oligomer. The term “backbone structure” and “oligomer linkages” may be used interchangeably and refer to the connection between monomers of the ASO. In naturally occurring oligonucleotides, the backbone comprises a 3′-5′ phosphodiester linkage connecting sugar moieties of the oligomer. The backbone structure or oligomer linkages of the ASOs described herein may include (but are not limited to) phosphorothioate, phosphorodithioate, phosphoroselenoate, phosphorodiselenoate, phosphoroanilothioate, phosphoraniladate, phosphoramidate, and the like. See, e.g., LaPlanche, et al., Nucleic Acids Res. 14:9081 (1986); Stec, et al., J. Am. Chem. Soc. 106:6077 (1984), Stein, et al., Nucleic Acids Res. 16:3209 (1988), Zon, et al., Anti-Cancer Drug Design 6:539 (1991); Zon, et al., Oligonucleotides and Analogues: A Practical Approach, pp. 87-108 (F. Eckstein, Ed., Oxford University Press, Oxford England (1991)); Stec, et al., U.S. Pat. No. 5,151,510; Uhlmann and Peyman, Chemical Reviews 90:543 (1990), of which entire content is incorporated herein by reference. In some embodiments, the backbone structure of the ASO does not contain phosphorous but rather contains peptide bonds, for example in a peptide nucleic acid (PNA), or linking groups including carbamate, amides, and linear and cyclic hydrocarbon groups. In some embodiments, the backbone modification is a phosphorothioate linkage. In some embodiments, the backbone modification is a phosphoramidate linkage.

[0232] In some embodiments, the stereochemistry at each of the phosphorus internucleotide linkages of the ASO backbone is random. In some embodiments, the stereochemistry at each of the phosphorus internucleotide linkages of the ASO backbone is controlled and is not random. For example, U.S. Pat. App. Pub. No. 2014/0194610, “Methods for the Synthesis of Functionalized Nucleic Acids,” incorporated herein by reference, describes methods for independently selecting the handedness of chirality at each phosphorous atom in a nucleic acid oligomer. In some embodiments, an ASO used in the methods of the invention, including, but not limited to, any of the ASOs set forth herein in Tables 5 and 6, comprises an ASO having phosphorus internucleotide linkages that are not random. In some embodiments, a composition used in the methods of the invention comprises a pure diastereomeric ASO. In some embodiments, a composition used in the methods of the invention comprises an ASO that has diastereomeric purity of at least about 90%, at least about 91%, at least about 92%, at least about 93%, at least about 94%, at least about 95%, at least about 96%, at least about 97%, at least about 98%, at least about 99%, about 100%, about 90% to about 100%, about 91% to about 100%, about 92% to about 100%, about 93% to about 100%, about 94% to about 100%, about 95% to about 100%, about 96% to about 100%, about 97% to about 100%, about 98% to about 100%, or about 99% to about 100%.

[0233] In some embodiments, the ASO (e.g., compound (I) or a salt thereof, or compound (II)) has a nonrandom mixture of Rp and Sp configurations at its phosphorus internucleotide linkages. For example, it has been suggested that a mix of Rp and Sp is required in antisense oligonucleotides or antisense oligomers to achieve a balance between good activity and nuclease stability (Wan, et al., 2014, “Synthesis, biophysical properties and biological activity of second-generation antisense oligonucleotides containing chiral phosphorothioate linkages,” Nucleic Acids Research 42 (22): 13456-13468, incorporated herein by reference). In some embodiments, an ASO used in the methods of the invention, including, but not limited to, any of the ASOs set forth herein in SEQ ID NOs: 21-114, comprises about 5-100% Rp, at least about 5% Rp, at least about 10% Rp, at least about 15% Rp, at least about 20% Rp, at least about 25% Rp, at least about 30% Rp, at least about 35% Rp, at least about 40% Rp, at least about 45% Rp, at least about 50% Rp, at least about 55% Rp, at least about 60% Rp, at least about 65% Rp, at least about 70% Rp, at least about 75% Rp, at least about 80% Rp, at least about 85% Rp, at least about 90% Rp, or at least about 95% Rp, with the remainder Sp, or about 100% Rp. In some embodiments, an ASO used in the methods of the invention, including, but not limited to, any of the ASOs set forth herein in SEQ ID NOs: 21-114, comprises about 10% to about 100% Rp, about 15% to about 100% Rp, about 20% to about 100% Rp, about 25% to about 100% Rp, about 30% to about 100% Rp, about 35% to about 100% Rp, about 40% to about 100% Rp, about 45% to about 100% Rp, about 50% to about 100% Rp, about 55% to about 100% Rp, about 60% to about 100% Rp, about 65% to about 100% Rp, about 70% to about 100% Rp, about 75% to about 100% Rp, about 80% to about 100% Rp, about 85% to about 100% Rp, about 90% to about 100% Rp, or about 95% to about 100% Rp, about 20% to about 80% Rp, about 25% to about 75% Rp, about 30% to about 70% Rp, about 40% to about 60% Rp, or about 45% to about 55% Rp, with the remainder Sp.

[0234] In some embodiments, an ASO used in the methods of the invention, including, but not limited to, any of the ASOs set forth herein in SEQ ID NOs: 21-114, comprises about 5-100% Sp, at least about 5% Sp, at least about 10% Sp, at least about 15% Sp, at least about 20% Sp, at least about 25% Sp, at least about 30% Sp, at least about 35% Sp, at least about 40% Sp, at least about 45% Sp, at least about 50% Sp, at least about 55% Sp, at least about 60% Sp, at least about 65% Sp, at least about 70% Sp, at least about 75% Sp, at least about 80% Sp, at least about 85% Sp, at least about 90% Sp, or at least about 95% Sp, with the remainder Rp, or about 100% Sp. In some embodiments, an ASO used in the methods of the invention, including, but not limited to, any of the ASOs set forth herein in SEQ ID NOs: 21-114, comprises about 10% to about 100% Sp, about 15% to about 100% Sp, about 20% to about 100% Sp, about 25% to about 100% Sp, about 30% to about 100% Sp, about 35% to about 100% Sp, about 40% to about 100% Sp, about 45% to about 100% Sp, about 50% to about 100% Sp, about 55% to about 100% Sp, about 60% to about 100% Sp, about 65% to about 100% Sp, about 70% to about 100% Sp, about 75% to about 100% Sp, about 80% to about 100% Sp, about 85% to about 100% Sp, about 90% to about 100% Sp, or about 95% to about 100% Sp, about 20% to about 80% Sp, about 25% to about 75% Sp, about 30% to about 70% Sp, about 40% to about 60% Sp, or about 45% to about 55% Sp, with the remainder Rp.

[0235] In some embodiments, an ASO used in the methods of the invention, including, but not limited to, any of the ASOs set forth herein in SEQ ID NOs: 21-67, 210-256 or 304-1099, comprises about 5-100% Rp, at least about 5% Rp, at least about 10% Rp, at least about 15% Rp, at least about 20% Rp, at least about 25% Rp, at least about 30% Rp, at least about 35% Rp, at least about 40% Rp, at least about 45% Rp, at least about 50% Rp, at least about 55% Rp, at least about 60% Rp, at least about 65% Rp, at least about 70% Rp, at least about 75% Rp, at least about 80% Rp, at least about 85% Rp, at least about 90% Rp, or at least about 95% Rp, with the remainder Sp, or about 100% Rp. In some embodiments, an ASO used in the methods of the invention, including, but not limited to, any of the ASOs set forth herein in SEQ ID NOs: 21-67, 210-256 or 304-1099, comprises about 10% to about 100% Rp, about 15% to about 100% Rp, about 20% to about 100% Rp, about 25% to about 100% Rp, about 30% to about 100% Rp, about 35% to about 100% Rp, about 40% to about 100% Rp, about 45% to about 100% Rp, about 50% to about 100% Rp, about 55% to about 100% Rp, about 60% to about 100% Rp, about 65% to about 100% Rp, about 70% to about 100% Rp, about 75% to about 100% Rp, about 80% to about 100% Rp, about 85% to about 100% Rp, about 90% to about 100% Rp, or about 95% to about 100% Rp, about 20% to about 80% Rp, about 25% to about 75% Rp, about 30% to about 70% Rp, about 40% to about 60% Rp, or about 45% to about 55% Rp, with the remainder Sp.

[0236] In some embodiments, an ASO used in the methods of the invention, including, but not limited to, any of the ASOs set forth herein in SEQ ID NOs: 21-67, 210-256 or 304-1099, comprises about 5-100% Sp, at least about 5% Sp, at least about 10% Sp, at least about 15% Sp, at least about 20% Sp, at least about 25% Sp, at least about 30% Sp, at least about 35% Sp, at least about 40% Sp, at least about 45% Sp, at least about 50% Sp, at least about 55% Sp, at least about 60% Sp, at least about 65% Sp, at least about 70% Sp, at least about 75% Sp, at least about 80% Sp, at least about 85% Sp, at least about 90% Sp, or at least about 95% Sp, with the remainder Rp, or about 100% Sp. In some embodiments, an ASO used in the methods of the invention, including, but not limited to, any of the ASOs set forth herein in SEQ ID NOs: 21-67, 210-256 or 304-1099, comprises about 10% to about 100% Sp, about 15% to about 100% Sp, about 20% to about 100% Sp, about 25% to about 100% Sp, about 30% to about 100% Sp, about 35% to about 100% Sp, about 40% to about 100% Sp, about 45% to about 100% Sp, about 50% to about 100% Sp, about 55% to about 100% Sp, about 60% to about 100% Sp, about 65% to about 100% Sp, about 70% to about 100% Sp, about 75% to about 100% Sp, about 80% to about 100% Sp, about 85% to about 100% Sp, about 90% to about 100% Sp, or about 95% to about 100% Sp, about 20% to about 80% Sp, about 25% to about 75% Sp, about 30% to about 70% Sp, about 40% to about 60% Sp, or about 45% to about 55% Sp, with the remainder Rp.

[0237] In some embodiments, an ASO used in the methods of the invention, including, but not limited to, any of the ASOs set forth herein in any one of the sequences listed in listed in Tables 4A, 4B, 5A, 5B, 6A, 6B, 7, 8A, and 8B, comprises about 5-100% Rp, at least about 5% Rp, at least about 10% Rp, at least about 15% Rp, at least about 20% Rp, at least about 25% Rp, at least about 30% Rp, at least about 35% Rp, at least about 40% Rp, at least about 45% Rp, at least about 50% Rp, at least about 55% Rp, at least about 60% Rp, at least about 65% Rp, at least about 70% Rp, at least about 75% Rp, at least about 80% Rp, at least about 85% Rp, at least about 90% Rp, or at least about 95% Rp, with the remainder Sp, or about 100% Rp. In some embodiments, an ASO used in the methods of the invention, including, but not limited to, any of the ASOs set forth herein in any one of the sequences listed in listed in Tables 4A, 4B, 5A, 5B, 6A, 6B, 7, 8A, and 8B, comprises about 10% to about 100% Rp, about 15% to about 100% Rp, about 20% to about 100% Rp, about 25% to about 100% Rp, about 30% to about 100% Rp, about 35% to about 100% Rp, about 40% to about 100% Rp, about 45% to about 100% Rp, about 50% to about 100% Rp, about 55% to about 100% Rp, about 60% to about 100% Rp, about 65% to about 100% Rp, about 70% to about 100% Rp, about 75% to about 100% Rp, about 80% to about 100% Rp, about 85% to about 100% Rp, about 90% to about 100% Rp, or about 95% to about 100% Rp, about 20% to about 80% Rp, about 25% to about 75% Rp, about 30% to about 70% Rp, about 40% to about 60% Rp, or about 45% to about 55% Rp, with the remainder Sp.

[0238] In some embodiments, an ASO used in the methods of the invention, including, but not limited to, any of the ASOs set forth herein in any one of the sequences listed in listed in Tables 4A, 4B, 5A, 5B, 6A, 6B, 7, 8A, and 8B, comprises about 5-100% Sp, at least about 5% Sp, at least about 10% Sp, at least about 15% Sp, at least about 20% Sp, at least about 25% Sp, at least about 30% Sp, at least about 35% Sp, at least about 40% Sp, at least about 45% Sp, at least about 50% Sp, at least about 55% Sp, at least about 60% Sp, at least about 65% Sp, at least about 70% Sp, at least about 75% Sp, at least about 80% Sp, at least about 85% Sp, at least about 90% Sp, or at least about 95% Sp, with the remainder Rp, or about 100% Sp. In some embodiments, an ASO used in the methods of the invention, including, but not limited to, any of the ASOs set forth herein in any one of the sequences listed in listed in Tables 4A, 4B, 5A, 5B, 6A, 6B, 7, 8A, and 8B, comprises about 10% to about 100% Sp, about 15% to about 100% Sp, about 20% to about 100% Sp, about 25% to about 100% Sp, about 30% to about 100% Sp, about 35% to about 100% Sp, about 40% to about 100% Sp, about 45% to about 100% Sp, about 50% to about 100% Sp, about 55% to about 100% Sp, about 60% to about 100% Sp, about 65% to about 100% Sp, about 70% to about 100% Sp, about 75% to about 100% Sp, about 80% to about 100% Sp, about 85% to about 100% Sp, about 90% to about 100% Sp, or about 95% to about 100% Sp, about 20% to about 80% Sp, about 25% to about 75% Sp, about 30% to about 70% Sp, about 40% to about 60% Sp, or about 45% to about 55% Sp, with the remainder Rp.

[0239] In some embodiments, an ASO used in the methods of the invention, having the structure of formula (I) or (II), comprises about 5-100% Sp, at least about 5% Sp, at least about 10% Sp, at least about 15% Sp, at least about 20% Sp, at least about 25% Sp, at least about 30% Sp, at least about 35% Sp, at least about 40% Sp, at least about 45% Sp, at least about 50% Sp, at least about 55% Sp, at least about 60% Sp, at least about 65% Sp, at least about 70% Sp, at least about 75% Sp, at least about 80% Sp, at least about 85% Sp, at least about 90% Sp, or at least about 95% Sp, with the remainder Rp, or about 100% Sp. In some embodiments, an ASO used in the methods of the invention, having the structure of formula (I) or (II), comprises about 10% to about 100% Sp, about 15% to about 100% Sp, about 20% to about 100% Sp, about 25% to about 100% Sp, about 30% to about 100% Sp, about 35% to about 100% Sp, about 40% to about 100% Sp, about 45% to about 100% Sp, about 50% to about 100% Sp, about 55% to about 100% Sp, about 60% to about 100% Sp, about 65% to about 100% Sp, about 70% to about 100% Sp, about 75% to about 100% Sp, about 80% to about 100% Sp, about 85% to about 100% Sp, about 90% to about 100% Sp, or about 95% to about 100% Sp, about 20% to about 80% Sp, about 25% to about 75% Sp, about 30% to about 70% Sp, about 40% to about 60% Sp, or about 45% to about 55% Sp, with the remainder Rp.

[0240] Any of the compounds (e.g., ASOs) described herein may contain a sugar moiety that comprises ribose or deoxyribose, as present in naturally occurring nucleotides, or a modified sugar moiety or sugar analog, including a morpholine ring. Non-limiting examples of modified sugar moieties include 2′ substitutions such as 2′-O-methyl (2′-O-Me), 2′-O-methoxyethyl (2′MOE), 2′-O-aminoethyl, 2′F, 2′-N-methyl-acetamide (2′-NMA); N3′→P5′ phosphoramidate, 2′ dimethylaminooxyethoxy, 2′ dimethylaminoethoxyethoxy, 2′-guanidinidium, 2′-O-guanidinium ethyl, carbamate modified sugars, and bicyclic modified sugars. In some embodiments, the sugar moiety modification is selected from 2′-O-Me, 2′F, 2′MOE, and 2′-NMA. As used herein, “2′-NMA” means a —O—CH2-C(═O)—NH—CH3 group in place of the 2′-OH group of a ribosyl sugar moiety. In some embodiments, the sugar moiety modification is an extra bridge bond, such as in a locked nucleic acid (LNA). In some embodiments the sugar analog contains a morpholine ring, such as phosphorodiamidate morpholino (PMO). In some embodiments, the sugar moiety comprises a ribofuransyl or 2′ deoxyribofuransyl modification. In some embodiments, the sugar moiety comprises 2′4′-constrained 2′O-methyloxyethyl (cMOE) modifications. In some embodiments, the sugar moiety comprises cEt 2′,4′ constrained 2′-O ethyl BNA modifications. In some embodiments, the sugar moiety comprises tricycloDNA (tcDNA) modifications. In some embodiments, the sugar moiety comprises ethylene nucleic acid (ENA) modifications. In some embodiments, the sugar moiety comprises MCE modifications. Modifications are known in the art and described in the literature, e.g., by Jarver, et al., 2014, Nucleic Acid Therapeutics 24 (1): 37-47, incorporated by reference for this purpose herein. “A Chemical View of Oligonucleotides for Exon Skipping and Related Drug Applications,” Nucleic Acid Therapeutics 24 (1): 37-47, incorporated by reference for this purpose herein.

[0241] In some embodiments, each monomer of the ASO is modified in the same way, for example each linkage of the backbone of the ASO comprises a phosphorothioate linkage or each ribose sugar moiety comprises a 2′O-methyl modification. Such modifications that are present on each of the monomer components of an ASO are referred to as “uniform modifications.” In some examples, a combination of different modifications may be desired, for example, an ASO may comprise a combination of phosphorodiamidate linkages and sugar moieties comprising morpholine rings (morpholinos). Combinations of different modifications to an ASO are referred to as “mixed modifications” or “mixed chemistries.”

[0242] In some embodiments, the ASO comprises one or more backbone modifications. In some embodiments, the ASO comprises one or more sugar moiety modification. In some embodiments, the ASO comprises one or more backbone modifications and one or more sugar moiety modifications. In some embodiments, the ASO comprises a 2′MOE modification and a phosphorothioate backbone. In some embodiments, the ASO comprises a phosphorodiamidate morpholino (PMO). In some embodiments, the ASO comprises a peptide nucleic acid (PNA). Any of the ASOs or any component of an ASO (e.g., a nucleobase, sugar moiety, backbone) described herein may be modified in order to achieve desired properties or activities of the ASO or reduce undesired properties or activities of the ASO. For example, an ASO or one or more components of any ASO may be modified to enhance binding affinity to a target sequence on a pre-mRNA transcript; reduce binding to any non-target sequence; reduce degradation by cellular nucleases (i.e., RNase H); improve uptake of the ASO into a cell and/or into the nucleus of a cell; alter the pharmacokinetics or pharmacodynamics of the ASO; and/or modulate the half-life of the ASO.

[0243] In some embodiments, the ASOs are comprised of 2′-O-(2-methoxyethyl) (MOE) phosphorothioate-modified nucleotides. ASOs comprised of such nucleotides are especially well-suited to the methods disclosed herein; oligomers having such modifications have been shown to have significantly enhanced resistance to nuclease degradation and increased bioavailability, making them suitable, for example, for oral delivery in some embodiments described herein. See e.g., Geary, et al., J Pharmacol Exp Ther. 2001; 296 (3): 890-7; Geary, et al., J Pharmacol Exp Ther. 2001; 296 (3): 898-904, of which entire content is incorporated herein by reference.

[0244] Methods of synthesizing ASOs will be known to one of skill in the art. Alternatively or in addition, ASOs may be obtained from a commercial source.

[0245] Unless specified otherwise, the left-hand end of single-stranded nucleic acid (e.g., pre-mRNA transcript, oligonucleotide, ASO, etc.) sequences is 5′ end and the left-hand direction of single or double-stranded nucleic acid sequences is referred to as 5′ direction. Similarly, the right-hand end or direction of a nucleic acid sequence (single or double stranded) is 3′ end or direction. Generally, a region or sequence that is 5′ to a reference point in a nucleic acid is referred to as “upstream,” and a region or sequence that is 3′ to a reference point in a nucleic acid is referred to as “downstream.” Generally, 5′ direction or end of an mRNA is where the initiation or start codon is located, while 3′ end or direction is where the termination codon is located. In some aspects, nucleotides that are upstream of a reference point in a nucleic acid may be designated by a negative number, while nucleotides that are downstream of a reference point may be designated by a positive number. For example, a reference point (e.g., an exon-exon junction in mRNA) may be designated as the “zero” site, and a nucleotide that is directly adjacent and upstream of the reference point is designated “minus one,” e.g., “−1,” while a nucleotide that is directly adjacent and downstream of the reference point is designated “plus one,” e.g., “+1.”

[0246] In some embodiments, the ASOs are complementary to (and bind to) a targeted portion of a SCN1A NIE containing pre-mRNA that is downstream (in 3′ direction) of 5′ splice site (or 3′ end of the NIE) of the included exon in a SCN1A NIE containing pre-mRNA (e.g., the direction designated by positive numbers relative to 5′ splice site). In some embodiments, the ASOs are complementary to a targeted portion of the SCN1A NIE containing pre-mRNA that is within the region about +1 to about +500 relative to 5′ splice site (or 3′ end) of the included exon. In some embodiments, the ASOs may be complementary to a targeted portion of a SCN1A NIE containing pre-mRNA that is within the region between nucleotides +6 and +496 relative to the 5′ splice site (or 3′ end) of the included exon. In some aspects, the ASOs are complementary to a targeted portion that is within the region about +1 to about +500, about +1 to about +490, about +1 to about +480, about +1 to about +470, about +1 to about +460, about +1 to about +450, about +1 to about +440, about +1 to about +430, about +1 to about +420, about +1 to about +410, about +1 to about +400, about +1 to about +390, about +1 to about +380, about +1 to about +370, about +1 to about +360, about +1 to about +350, about +1 to about +340, about +1 to about +330, about +1 to about +320, about +1 to about +310, about +1 to about +300, about +1 to about +290, about +1 to about +280, about +1 to about +270, about +1 to about +260, about +1 to about +250, about +1 to about +240, about +1 to about +230, about +1 to about +220, about +1 to about +210, about +1 to about +200, about +1 to about +190, about +1 to about +180, about +1 to about +170, about +1 to about +160, about +1 to about +150, about +1 to about +140, about +1 to about +130, about +1 to about +120, about +1 to about +110, about +1 to about +100, about +1 to about +90, about +1 to about +80, about +1 to about +70, about +1 to about +60, about +1 to about +50, about +1 to about +40, about +1 to about +30, or about +1 to about +20 relative to 5′ splice site (or 3′ end) of the included exon. In some aspects, the ASOs are complementary to a targeted portion that is within the region from about +1 to about +100, from about +100 to about +200, from about +200 to about +300, from about +300 to about +400, or from about +400 to about +500 relative to 5′ splice site (or 3′ end) of the included exon.

[0247] In some embodiments, the ASOs are complementary to (and bind to) a targeted portion of a SCN1A NIE containing pre-mRNA that is upstream (in 5′ direction) of 5′ splice site (or 3′ end) of the included exon in a SCN1A NIE containing pre-mRNA (e.g., the direction designated by negative numbers relative to 5′ splice site). In some embodiments, the ASOs are complementary to a targeted portion of the SCN1A NIE containing pre-mRNA that is within the region about −4 to about −270 relative to 5′ splice site (or 3′ end) of the included exon. In some embodiments, the ASOs may be complementary to a targeted portion of a SCN1A NIE containing pre-mRNA that is within the region between nucleotides −1 and −264 relative to 5′ splice site (or 3′ end) of the included exon. In some aspects, the ASOs are complementary to a targeted portion that is within the region about −1 to about −270, about −1 to about −260, about −1 to about −250, about −1 to about −240, about −1 to about −230, about −1 to about −220, about −1 to about −210, about −1 to about −200, about −1 to about −190, about −1 to about −180, about −1 to about −170, about −1 to about −160, about −1 to about −150, about −1 to about −140, about −1 to about −130, about −1 to about −120, about −1 to about −110, about −1 to about −100, about −1 to about −90, about −1 to about −80, about −1 to about −70, about −1 to about −60, about −1 to about −50, about −1 to about −40, about −1 to about −30, or about −1 to about −20 relative to 5′ splice site (or 3′ end) of the included exon. In some aspects, the ASOs are complementary to a targeted portion that is within the region from about −1 to about −50, from about −50 to about −100, from about −100 to about −150, from about −150 to about −200, or from about −200 to about −250 relative to 5′ splice site (or 3′ end) of the included exon.

[0248] In some embodiments, the ASOs are complementary to a targeted region of a SCN1A NIE containing pre-mRNA that is upstream (in 5′ direction) of 3′ splice site (or 5′ end) of the included exon in a SCN1A NIE containing pre-mRNA (e.g., in the direction designated by negative numbers). In some embodiments, the ASOs are complementary to a targeted portion of the SCN1A NIE containing pre-mRNA that is within the region about −1 to about −500 relative to the 3′ splice site (or 5′ end) of the included exon. In some embodiments, the ASOs are complementary to a targeted portion of the SCN1A NIE containing pre-mRNA that is within the region −1 to −496 relative to 3′ splice site of the included exon. In some aspects, the ASOs are complementary to a targeted portion that is within the region about −1 to about −500, about −1 to about −490, about −1 to about −480, about −1 to about −470, about −1 to about −460, about −1 to about −450, about −1 to about −440, about −1 to about −430, about −1 to about −420, about −1 to about −410, about −1 to about −400, about −1 to about −390, about −1 to about −380, about −1 to about −370, about −1 to about −360, about −1 to about −350, about −1 to about −340, about −1 to about −330, about −1 to about −320, about −1 to about −310, about −1 to about −300, about −1 to about −290, about −1 to about −280, about −1 to about −270, about −1 to about −260, about −1 to about −250, about −1 to about −240, about −1 to about −230, about −1 to about −220, about −1 to about −210, about −1 to about −200, about −1 to about −190, about −1 to about −180, about −1 to about −170, about −1 to about −160, about −1 to about −150, about −1 to about −140, about −1 to about −130, about −1 to about −120, about −1 to about −110, about −1 to about −100, about −1 to about −90, about −1 to about −80, about −1 to about −70, about −1 to about −60, about −1 to about −50, about −1 to about −40, or about −1 to about −30 relative to 3′ splice site of the included exon. In some aspects, the ASOs are complementary to a targeted portion that is within the region from about −1 to about −100, from about −100 to about −200, from about −200 to about −300, from about −300 to about −400, or from about −400 to about −500 relative to 3′ splice site of the included exon.

[0249] In some embodiments, the ASOs are complementary to a targeted region of a SCN1A NIE containing pre-mRNA that is downstream (in 3′ direction) of 3′ splice site (5′ end) of the included exon in a SCN1A NIE containing pre-mRNA (e.g., in the direction designated by positive numbers). In some embodiments, the ASOs are complementary to a targeted portion of the SCN1A NIE containing pre-mRNA that is within the region of about +1 to about +100 relative to 3′ splice site of the included exon. In some aspects, the ASOs are complementary to a targeted portion that is within the region about +1 to about +90, about +1 to about +80, about +1 to about +70, about +1 to about +60, about +1 to about +50, about +1 to about +40, about +1 to about +30, about +1 to about +20, or about +1 to about +10 relative to 3′ splice site of the included exon.

[0250] In some embodiments, the targeted portion of the SCN1A NIE containing pre-mRNA is within the region +100 relative to 5′ splice site (3′ end) of the included exon to −100 relative to 3′ splice site (5′ end) of the included exon. In some embodiments, the targeted portion of the SCN1A NIE containing pre-mRNA is within the NIE. In some embodiments, the targeted portion of the SCN1A NIE containing pre-mRNA comprises a pseudo-exon and intron boundary.

[0251] The ASOs may be of any length suitable for specific binding and effective enhancement of splicing. In some embodiments, the ASOs consist of 8 to 50 nucleobases. For example, the ASO may be 8, 9, 10, 11, 12, 13, 14, 15, 16, 17, 18, 19, 20, 21, 22, 23, 24, 25, 26, 27, 28, 29, 30, 31, 32, 33, 34, 35, 40, 45, or 50 nucleobases in length. In some embodiments, the ASOs consist of more than 50 nucleobases. In some embodiments, the ASO is from 8 to 50 nucleobases, 8 to 40 nucleobases, 8 to 35 nucleobases, 8 to 30 nucleobases, 8 to 25 nucleobases, 8 to 20 nucleobases, 8 to 15 nucleobases, 9 to 50 nucleobases, 9 to 40 nucleobases, 9 to 35 nucleobases, 9 to 30 nucleobases, 9 to 25 nucleobases, 9 to 20 nucleobases, 9 to 15 nucleobases, 10 to 50 nucleobases, 10 to 40 nucleobases, 10 to 35 nucleobases, 10 to 30 nucleobases, 10 to 25 nucleobases, 10 to 20 nucleobases, 10 to 15 nucleobases, 11 to 50 nucleobases, 11 to 40 nucleobases, 11 to 35 nucleobases, 11 to 30 nucleobases, 11 to 25 nucleobases, 11 to 20 nucleobases, 11 to 15 nucleobases, 12 to 50 nucleobases, 12 to 40 nucleobases, 12 to 35 nucleobases, 12 to 30 nucleobases, 12 to 25 nucleobases, 12 to 20 nucleobases, 12 to 15 nucleobases, 13 to 50 nucleobases, 13 to 40 nucleobases, 13 to 35 nucleobases, 13 to 30 nucleobases, 13 to 25 nucleobases, 13 to 20 nucleobases, 14 to 50 nucleobases, 14 to 40 nucleobases, 14 to 35 nucleobases, 14 to 30 nucleobases, 14 to 25 nucleobases, 14 to 20 nucleobases, 15 to 50 nucleobases, 15 to 40 nucleobases, 15 to 35 nucleobases, 15 to 30 nucleobases, 15 to 25 nucleobases, 15 to 20 nucleobases, 20 to 50 nucleobases, 20 to 40 nucleobases, 20 to 35 nucleobases, 20 to 30 nucleobases, 20 to 25 nucleobases, 25 to 50 nucleobases, 25 to 40 nucleobases, 25 to 35 nucleobases, or 25 to 30 nucleobases in length. In some embodiments, the ASOs are 18 nucleotides in length. In some embodiments, the ASOs are 15 nucleotides in length. In some embodiments, the ASOs are 25 nucleotides in length.

[0252] In some embodiments, two or more ASOs with different chemistries but complementary to the same targeted portion of the NIE containing pre-mRNA are used. In some embodiments, two or more ASOs that are complementary to different targeted portions of the NIE containing pre-mRNA are used.

[0253] In some embodiments, the antisense oligomers of the present disclosure (e.g., compound (I) or a salt thereof, or compound (II)) are chemically linked to one or more moieties or conjugates, e.g., a targeting moiety or other conjugate that enhances the activity or cellular uptake of the oligonucleotide. Such moieties include, but are not limited to, a lipid moiety, e.g., as a cholesterol moiety, a cholesteryl moiety, an aliphatic chain, e.g., dodecandiol or undecyl residues, a polyamine, or a polyethylene glycol chain, or adamantane acetic acid. Oligonucleotides comprising lipophilic moieties and preparation methods have been described in the published literature. In some embodiments, the antisense oligomer is conjugated with a moiety including, but not limited to, an abasic nucleotide, a polyether, a polyamine, a polyamide, a peptide, a carbohydrate, e.g., N-acetylgalactosamine (GalNAc), N-Ac-Glucosamine (GluNAc), or mannose (e.g., mannose-6-phosphate), a lipid, or a polyhydrocarbon compound. Conjugates can be linked to one or more of any nucleotides comprising the antisense oligomer at any of several positions on the sugar, base or phosphate group, as understood in the art and described in the literature, e.g., using a linker. Linkers can include a bivalent or trivalent branched linker. In some embodiments, the conjugate is attached to the 3′ end of the antisense oligomer. Methods of preparing oligonucleotide conjugates are described, e.g., in U.S. Pat. No. 8,450,467, “Carbohydrate conjugates as delivery agents for oligonucleotides,” incorporated by reference herein.

[0254] In some embodiments, the nucleic acid to be targeted by an ASO is a SCN1A NIE containing pre-mRNA expressed in a cell, such as a eukaryotic cell. In some embodiments, the term “cell” may refer to a population of cells. In some embodiments, the cell is in a subject. In some embodiments, the cell is isolated from a subject. In some embodiments, the cell is ex vivo. In some embodiments, the cell is a condition or disease-relevant cell or a cell line. In some embodiments, the cell is in vitro (e.g., in cell culture).

[0255] In some embodiments, the compound is the salt of a nucleotide. In some embodiments, the compound is the salt of a nucleotide, fully phosphorothioate-linked oligonucleotide. In some embodiments, the compound is the salt of a nucleotide in which the salt binds to the phosphate-link. In some embodiments, the compound is the salt of a nucleotide, fully phosphorothioate-linked oligonucleotide in which the salt binds to the phosphate-link. In some embodiments, the compound is the sodium salt of a nucleotide. In some embodiments, the compound is the sodium salt of a nucleotide, fully phosphorothioate-linked oligonucleotide. In some embodiments, the compound is the sodium salt of a nucleotide in which the sodium salt binds to the phosphate-link. In some embodiments, the compound is the sodium salt of a nucleotide, fully phosphorothioate-linked oligonucleotide in which the sodium salt binds to the phosphate-link. In some embodiments, the compound is the potassium salt of a nucleotide. In some embodiments, the compound is the potassium salt of a nucleotide, fully phosphorothioate-linked oligonucleotide. In some embodiments, the compound is the potassium salt of a nucleotide in which the potassium salt binds to the phosphate-link. In some embodiments, the compound is the potassium salt of a nucleotide, fully phosphorothioate-linked oligonucleotide in which the potassium salt binds to the phosphate-link. In some cases, the compound is compound (I) or a salt thereof. In some cases, the compound is compound (II).

[0256] In some embodiments, the compound is the monosodium salt of a 2-nucleotide (2-mer). In some embodiments, the compound is the disodium salt of a 3-nucleotide (3-mer). In some embodiments, the compound is the trisodium salt of a 4-nucleotide (4-mer). In some embodiments, the compound is the tetrasodium salt of a 5-nucleotide (5-mer). In some embodiments, the compound is the pentasodium salt of a 6-nucleotide (6-mer). In some embodiments, the compound is the hexasodium salt of a 7-nucleotide (7-mer). In some embodiments, the compound is the heptasodium salt of an 8-nucleotide (8-mer). In some embodiments, the compound is the octasodium salt of a 9-nucleotide (9-mer). In some embodiments, the compound is the nonasodium salt of a 10-nucleotide (10-mer). In some embodiments, the compound is the decasodium salt of a 11-nucleotide (11-mer). In some embodiments, the compound is the undecasodium salt of a 12-nucleotide (12-mer). In some embodiments, the compound is the dodecasodium salt of a 13-nucleotide (13-mer). In some embodiments, the compound is the tridecasodium salt of a 14-nucleotide (14-mer). In some embodiments, the compound is the tetradecasodium salt of a 15-nucleotide (15-mer). In some embodiments, the compound is the pentadecasodium salt of a 16-nucleotide (16-mer). In some embodiments, the compound is the hexadecasodium salt of a 17-nucleotide (17-mer). In some embodiments, the compound is the heptadecasodium salt of an 18-nucleotide (18-mer). In some embodiments, the compound is the octadecasodium salt of a 19-nucleotide (19-mer). In some embodiments, the compound is the nonadecasodium salt of a 20-nucleotide (20-mer). In some embodiments, the compound is the icosasodium salt of a 21-nucleotide (21-mer). In some embodiments, the compound is the henicosasodium salt of a 22-nucleotide (22-mer). In some embodiments, the compound is the docosasodium salt of a 23-nucleotide (23-mer). In some embodiments, the compound is the tricosasodium salt of a 24-nucleotide (24-mer). In some embodiments, the compound is the tetracosasodium salt of a 25-nucleotide (25-mer). In some embodiments, the compound is the pentacosasodium salt of a 26-nucleotide (26-mer). In some embodiments, the compound is the hexacosasodium salt of a 27-nucleotide (27-mer). In some embodiments, the compound is the heptacosasodium salt of a 28-nucleotide (28-mer). In some embodiments, the compound is the octacosasodium salt of a 29-nucleotide (29-mer). In some embodiments, the compound is the nonacosasodium salt of a 30-nucleotide (30-mer). In some embodiments, the compound is the triacontasodium salt of a 31-nucleotide (31-mer). In some embodiments, the compound is the hentriacontasodium salt of a 32-nucleotide (32-mer). In some embodiments, the compound is the dotriacontasodium salt of a 33-nucleotide (33-mer). In some embodiments, the compound is the tritriacontasodium salt of a 34-nucleotide (34-mer). In some embodiments, the compound is the tetratriacontasodium salt of a 35-nucleotide (35-mer). In some embodiments, the compound is the pentatriacontasodium salt of a 36-nucleotide (36-mer). In some embodiments, the compound is the hexatriacontasodium salt of a 37-nucleotide (37-mer). In some embodiments, the compound is the heptatriacontasodium salt of a 38-nucleotide (38-mer). In some embodiments, the compound is the octatriacontasodium salt of a 39-nucleotide (39-mer). In some embodiments, the compound is the nonatriacontasodium salt of a 40-nucleotide (40-mer). In some embodiments, the compound is the tetracontasodium salt of a 41-nucleotide (41-mer). In some embodiments, the compound is the hentetracontasodium salt of a 42-nucleotide (42-mer). In some embodiments, the compound is the dotetracontasodium salt of a 43-nucleotide (43-mer). In some embodiments, the compound is the tritetracontasodium salt of a 44-nucleotide (44-mer). In some embodiments, the compound is the tetratetracontasodium salt of a 45-nucleotide (45-mer). In some embodiments, the compound is the pentatetracontasodium salt of a 46-nucleotide (46-mer). In some embodiments, the compound is the hexatetracontasodium salt of a 47-nucleotide (47-mer). In some embodiments, the compound is the heptatetracontasodium salt of a 48-nucleotide (48-mer). In some embodiments, the compound is the octatetracontasodium salt of a 49-nucleotide (49-mer). In some embodiments, the compound is the nonatetracontasodium salt of a 50-nucleotide (50-mer). In some embodiments, the compound is the pentacontasodium salt of a 51-nucleotide (51-mer).

[0257] In some embodiments, the compound is the monosodium salt of a 2-nucleotide (2-mer), fully phosphorothioate-linked oligonucleotide. In some embodiments, the compound is the disodium salt of a 3-nucleotide (3-mer), fully phosphorothioate-linked oligonucleotide. In some embodiments, the compound is the trisodium salt of a 4-nucleotide (4-mer), fully phosphorothioate-linked oligonucleotide. In some embodiments, the compound is the tetrasodium salt of a 5-nucleotide (5-mer), fully phosphorothioate-linked oligonucleotide. In some embodiments, the compound is the pentasodium salt of a 6-nucleotide (6-mer), fully phosphorothioate-linked oligonucleotide. In some embodiments, the compound is the hexasodium salt of a 7-nucleotide (7-mer), fully phosphorothioate-linked oligonucleotide. In some embodiments, the compound is the heptasodium salt of an 8-nucleotide (8-mer), fully phosphorothioate-linked oligonucleotide. In some embodiments, the compound is the octasodium salt of a 9-nucleotide (9-mer), fully phosphorothioate-linked oligonucleotide. In some embodiments, the compound is the nonasodium salt of a 10-nucleotide (10-mer), fully phosphorothioate-linked oligonucleotide. In some embodiments, the compound is the decasodium salt of a 11-nucleotide (11-mer), fully phosphorothioate-linked oligonucleotide. In some embodiments, the compound is the undecasodium salt of a 12-nucleotide (12-mer), fully phosphorothioate-linked oligonucleotide. In some embodiments, the compound is the dodecasodium salt of a 13-nucleotide (13-mer), fully phosphorothioate-linked oligonucleotide. In some embodiments, the compound is the tridecasodium salt of a 14-nucleotide (14-mer), fully phosphorothioate-linked oligonucleotide. In some embodiments, the compound is the tetradecasodium salt of a 15-nucleotide (15-mer), fully phosphorothioate-linked oligonucleotide. In some embodiments, the compound is the pentadecasodium salt of a 16-nucleotide (16-mer), fully phosphorothioate-linked oligonucleotide. In some embodiments, the compound is the hexadecasodium salt of a 17-nucleotide (17-mer), fully phosphorothioate-linked oligonucleotide. In some embodiments, the compound is the heptadecasodium salt of an 18-nucleotide (18-mer), fully phosphorothioate-linked oligonucleotide. In some embodiments, the compound is the octadecasodium salt of a 19-nucleotide (19-mer), fully phosphorothioate-linked oligonucleotide. In some embodiments, the compound is the nonadecasodium salt of a 20-nucleotide (20-mer), fully phosphorothioate-linked oligonucleotide. In some embodiments, the compound is the icosasodium salt of a 21-nucleotide (21-mer), fully phosphorothioate-linked oligonucleotide. In some embodiments, the compound is the henicosasodium salt of a 22-nucleotide (22-mer), fully phosphorothioate-linked oligonucleotide. In some embodiments, the compound is the docosasodium salt of a 23-nucleotide (23-mer), fully phosphorothioate-linked oligonucleotide. In some embodiments, the compound is the tricosasodium salt of a 24-nucleotide (24-mer), fully phosphorothioate-linked oligonucleotide. In some embodiments, the compound is the tetracosasodium salt of a 25-nucleotide (25-mer), fully phosphorothioate-linked oligonucleotide. In some embodiments, the compound is the pentacosasodium salt of a 26-nucleotide (26-mer), fully phosphorothioate-linked oligonucleotide. In some embodiments, the compound is the hexacosasodium salt of a 27-nucleotide (27-mer), fully phosphorothioate-linked oligonucleotide. In some embodiments, the compound is the heptacosasodium salt of a 28-nucleotide (28-mer), fully phosphorothioate-linked oligonucleotide. In some embodiments, the compound is the octacosasodium salt of a 29-nucleotide (29-mer), fully phosphorothioate-linked oligonucleotide. In some embodiments, the compound is the nonacosasodium salt of a 30-nucleotide (30-mer), fully phosphorothioate-linked oligonucleotide. In some embodiments, the compound is the triacontasodium salt of a 31-nucleotide (31-mer), fully phosphorothioate-linked oligonucleotide. In some embodiments, the compound is the hentriacontasodium salt of a 32-nucleotide (32-mer), fully phosphorothioate-linked oligonucleotide. In some embodiments, the compound is the dotriacontasodium salt of a 33-nucleotide (33-mer), fully phosphorothioate-linked oligonucleotide. In some embodiments, the compound is the tritriacontasodium salt of a 34-nucleotide (34-mer), fully phosphorothioate-linked oligonucleotide. In some embodiments, the compound is the tetratriacontasodium salt of a 35-nucleotide (35-mer), fully phosphorothioate-linked oligonucleotide. In some embodiments, the compound is the pentatriacontasodium salt of a 36-nucleotide (36-mer), fully phosphorothioate-linked oligonucleotide. In some embodiments, the compound is the hexatriacontasodium salt of a 37-nucleotide (37-mer), fully phosphorothioate-linked oligonucleotide. In some embodiments, the compound is the heptatriacontasodium salt of a 38-nucleotide (38-mer), fully phosphorothioate-linked oligonucleotide. In some embodiments, the compound is the octatriacontasodium salt of a 39-nucleotide (39-mer), fully phosphorothioate-linked oligonucleotide. In some embodiments, the compound is the nonatriacontasodium salt of a 40-nucleotide (40-mer), fully phosphorothioate-linked oligonucleotide. In some embodiments, the compound is the tetracontasodium salt of a 41-nucleotide (41-mer), fully phosphorothioate-linked oligonucleotide. In some embodiments, the compound is the hentetracontasodium salt of a 42-nucleotide (42-mer), fully phosphorothioate-linked oligonucleotide. In some embodiments, the compound is the dotetracontasodium salt of a 43-nucleotide (43-mer), fully phosphorothioate-linked oligonucleotide. In some embodiments, the compound is the tritetracontasodium salt of a 44-nucleotide (44-mer), fully phosphorothioate-linked oligonucleotide. In some embodiments, the compound is the tetratetracontasodium salt of a 45-nucleotide (45-mer), fully phosphorothioate-linked oligonucleotide. In some embodiments, the compound is the pentatetracontasodium salt of a 46-nucleotide (46-mer), fully phosphorothioate-linked oligonucleotide. In some embodiments, the compound is the hexatetracontasodium salt of a 47-nucleotide (47-mer), fully phosphorothioate-linked oligonucleotide. In some embodiments, the compound is the heptatetracontasodium salt of a 48-nucleotide (48-mer), fully phosphorothioate-linked oligonucleotide. In some embodiments, the compound is the octatetracontasodium salt of a 49-nucleotide (49-mer), fully phosphorothioate-linked oligonucleotide. In some embodiments, the compound is the nonatetracontasodium salt of a 50-nucleotide (50-mer), fully phosphorothioate-linked oligonucleotide. In some embodiments, the compound is the pentacontasodium salt of a 51-nucleotide (51-mer), fully phosphorothioate-linked oligonucleotide.

[0258] In some embodiments, the compound is the monopotassium salt of a 2-nucleotide (2-mer). In some embodiments, the compound is the dipotassium salt of a 3-nucleotide (3-mer). In some embodiments, the compound is the tripotassium salt of a 4-nucleotide (4-mer). In some embodiments, the compound is the tetrapotassium salt of a 5-nucleotide (5-mer). In some embodiments, the compound is the pentapotassium salt of a 6-nucleotide (6-mer). In some embodiments, the compound is the hexapotassium salt of a 7-nucleotide (7-mer). In some embodiments, the compound is the heptapotassium salt of an 8-nucleotide (8-mer). In some embodiments, the compound is the octapotassium salt of a 9-nucleotide (9-mer). In some embodiments, the compound is the nonapotassium salt of a 10-nucleotide (10-mer). In some embodiments, the compound is the decapotassium salt of a 11-nucleotide (11-mer). In some embodiments, the compound is the undecapotassium salt of a 12-nucleotide (12-mer). In some embodiments, the compound is the dodecapotassium salt of a 13-nucleotide (13-mer). In some embodiments, the compound is the tridecapotassium salt of a 14-nucleotide (14-mer). In some embodiments, the compound is the tetradecapotassium salt of a 15-nucleotide (15-mer). In some embodiments, the compound is the pentadecapotassium salt of a 16-nucleotide (16-mer). In some embodiments, the compound is the hexadecapotassium salt of a 17-nucleotide (17-mer). In some embodiments, the compound is the heptadecapotassium salt of an 18-nucleotide (18-mer). In some embodiments, the compound is the octadecapotassium salt of a 19-nucleotide (19-mer). In some embodiments, the compound is the nonadecapotassium salt of a 20-nucleotide (20-mer). In some embodiments, the compound is the icosapotassium salt of a 21-nucleotide (21-mer). In some embodiments, the compound is the henicosapotassium salt of a 22-nucleotide (22-mer). In some embodiments, the compound is the docosapotassium salt of a 23-nucleotide (23-mer). In some embodiments, the compound is the tricosapotassium salt of a 24-nucleotide (24-mer). In some embodiments, the compound is the tetracosapotassium salt of a 25-nucleotide (25-mer). In some embodiments, the compound is the pentacosapotassium salt of a 26-nucleotide (26-mer). In some embodiments, the compound is the hexacosapotassium salt of a 27-nucleotide (27-mer). In some embodiments, the compound is the heptacosapotassium salt of a 28-nucleotide (28-mer). In some embodiments, the compound is the octacosapotassium salt of a 29-nucleotide (29-mer). In some embodiments, the compound is the nonacosapotassium salt of a 30-nucleotide (30-mer). In some embodiments, the compound is the triacontapotassium salt of a 31-nucleotide (31-mer). In some embodiments, the compound is the hentriacontapotassium salt of a 32-nucleotide (32-mer). In some embodiments, the compound is the dotriacontapotassium salt of a 33-nucleotide (33-mer). In some embodiments, the compound is the tritriacontapotassium salt of a 34-nucleotide (34-mer). In some embodiments, the compound is the tetratriacontapotassium salt of a 35-nucleotide (35-mer). In some embodiments, the compound is the pentatriacontapotassium salt of a 36-nucleotide (36-mer). In some embodiments, the compound is the hexatriacontapotassium salt of a 37-nucleotide (37-mer). In some embodiments, the compound is the heptatriacontapotassium salt of a 38-nucleotide (38-mer). In some embodiments, the compound is the octatriacontapotassium salt of a 39-nucleotide (39-mer). In some embodiments, the compound is the nonatriacontapotassium salt of a 40-nucleotide (40-mer). In some embodiments, the compound is the tetracontapotassium salt of a 41-nucleotide (41-mer). In some embodiments, the compound is the hentetracontapotassium salt of a 42-nucleotide (42-mer). In some embodiments, the compound is the dotetracontapotassium salt of a 43-nucleotide (43-mer). In some embodiments, the compound is the tritetracontapotassium salt of a 44-nucleotide (44-mer). In some embodiments, the compound is the tetratetracontapotassium salt of a 45-nucleotide (45-mer). In some embodiments, the compound is the pentatetracontapotassium salt of a 46-nucleotide (46-mer). In some embodiments, the compound is the hexatetracontapotassium salt of a 47-nucleotide (47-mer). In some embodiments, the compound is the heptatetracontapotassium salt of a 48-nucleotide (48-mer). In some embodiments, the compound is the octatetracontapotassium salt of a 49-nucleotide (49-mer). In some embodiments, the compound is the nonatetracontapotassium salt of a 50-nucleotide (50-mer). In some embodiments, the compound is the pentacontapotassium salt of a 51-nucleotide (51-mer).

[0259] In some embodiments, the compound is the monopotassium salt of a 2-nucleotide (2-mer), fully phosphorothioate-linked oligonucleotide. In some embodiments, the compound is the dipotassium salt of a 3-nucleotide (3-mer), fully phosphorothioate-linked oligonucleotide. In some embodiments, the compound is the tripotassium salt of a 4-nucleotide (4-mer), fully phosphorothioate-linked oligonucleotide. In some embodiments, the compound is the tetrapotassium salt of a 5-nucleotide (5-mer), fully phosphorothioate-linked oligonucleotide. In some embodiments, the compound is the pentapotassium salt of a 6-nucleotide (6-mer), fully phosphorothioate-linked oligonucleotide. In some embodiments, the compound is the hexapotassium salt of a 7-nucleotide (7-mer), fully phosphorothioate-linked oligonucleotide. In some embodiments, the compound is the heptapotassium salt of an 8-nucleotide (8-mer), fully phosphorothioate-linked oligonucleotide. In some embodiments, the compound is the octapotassium salt of a 9-nucleotide (9-mer), fully phosphorothioate-linked oligonucleotide. In some embodiments, the compound is the nonapotassium salt of a 10-nucleotide (10-mer), fully phosphorothioate-linked oligonucleotide. In some embodiments, the compound is the decapotassium salt of a 11-nucleotide (11-mer), fully phosphorothioate-linked oligonucleotide. In some embodiments, the compound is the undecapotassium salt of a 12-nucleotide (12-mer), fully phosphorothioate-linked oligonucleotide. In some embodiments, the compound is the dodecapotassium salt of a 13-nucleotide (13-mer), fully phosphorothioate-linked oligonucleotide. In some embodiments, the compound is the tridecapotassium salt of a 14-nucleotide (14-mer), fully phosphorothioate-linked oligonucleotide. In some embodiments, the compound is the tetradecapotassium salt of a 15-nucleotide (15-mer), fully phosphorothioate-linked oligonucleotide. In some embodiments, the compound is the pentadecapotassium salt of a 16-nucleotide (16-mer), fully phosphorothioate-linked oligonucleotide. In some embodiments, the compound is the hexadecapotassium salt of a 17-nucleotide (17-mer), fully phosphorothioate-linked oligonucleotide. In some embodiments, the compound is the heptadecapotassium salt of an 18-nucleotide (18-mer), fully phosphorothioate-linked oligonucleotide. In some embodiments, the compound is the octadecapotassium salt of a 19-nucleotide (19-mer), fully phosphorothioate-linked oligonucleotide. In some embodiments, the compound is the nonadecapotassium salt of a 20-nucleotide (20-mer), fully phosphorothioate-linked oligonucleotide. In some embodiments, the compound is the icosapotassium salt of a 21-nucleotide (21-mer), fully phosphorothioate-linked oligonucleotide. In some embodiments, the compound is the henicosapotassium salt of a 22-nucleotide (22-mer), fully phosphorothioate-linked oligonucleotide. In some embodiments, the compound is the docosapotassium salt of a 23-nucleotide (23-mer), fully phosphorothioate-linked oligonucleotide. In some embodiments, the compound is the tricosapotassium salt of a 24-nucleotide (24-mer), fully phosphorothioate-linked oligonucleotide. In some embodiments, the compound is the tetracosapotassium salt of a 25-nucleotide (25-mer), fully phosphorothioate-linked oligonucleotide. In some embodiments, the compound is the pentacosapotassium salt of a 26-nucleotide (26-mer), fully phosphorothioate-linked oligonucleotide. In some embodiments, the compound is the hexacosapotassium salt of a 27-nucleotide (27-mer), fully phosphorothioate-linked oligonucleotide. In some embodiments, the compound is the heptacosapotassium salt of a 28-nucleotide (28-mer), fully phosphorothioate-linked oligonucleotide. In some embodiments, the compound is the octacosapotassium salt of a 29-nucleotide (29-mer), fully phosphorothioate-linked oligonucleotide. In some embodiments, the compound is the nonacosapotassium salt of a 30-nucleotide (30-mer), fully phosphorothioate-linked oligonucleotide. In some embodiments, the compound is the triacontapotassium salt of a 31-nucleotide (31-mer), fully phosphorothioate-linked oligonucleotide. In some embodiments, the compound is the hentriacontapotassium salt of a 32-nucleotide (32-mer), fully phosphorothioate-linked oligonucleotide. In some embodiments, the compound is the dotriacontapotassium salt of a 33-nucleotide (33-mer), fully phosphorothioate-linked oligonucleotide. In some embodiments, the compound is the tritriacontapotassium salt of a 34-nucleotide (34-mer), fully phosphorothioate-linked oligonucleotide. In some embodiments, the compound is the tetratriacontapotassium salt of a 35-nucleotide (35-mer), fully phosphorothioate-linked oligonucleotide. In some embodiments, the compound is the pentatriacontapotassium salt of a 36-nucleotide (36-mer), fully phosphorothioate-linked oligonucleotide. In some embodiments, the compound is the hexatriacontapotassium salt of a 37-nucleotide (37-mer), fully phosphorothioate-linked oligonucleotide. In some embodiments, the compound is the heptatriacontapotassium salt of a 38-nucleotide (38-mer), fully phosphorothioate-linked oligonucleotide. In some embodiments, the compound is the octatriacontapotassium salt of a 39-nucleotide (39-mer), fully phosphorothioate-linked oligonucleotide. In some embodiments, the compound is the nonatriacontapotassium salt of a 40-nucleotide (40-mer), fully phosphorothioate-linked oligonucleotide. In some embodiments, the compound is the tetracontapotassium salt of a 41-nucleotide (41-mer), fully phosphorothioate-linked oligonucleotide. In some embodiments, the compound is the hentetracontapotassium salt of a 42-nucleotide (42-mer), fully phosphorothioate-linked oligonucleotide. In some embodiments, the compound is the dotetracontapotassium salt of a 43-nucleotide (43-mer), fully phosphorothioate-linked oligonucleotide. In some embodiments, the compound is the tritetracontapotassium salt of a 44-nucleotide (44-mer), fully phosphorothioate-linked oligonucleotide. In some embodiments, the compound is the tetratetracontapotassium salt of a 45-nucleotide (45-mer), fully phosphorothioate-linked oligonucleotide. In some embodiments, the compound is the pentatetracontapotassium salt of a 46-nucleotide (46-mer), fully phosphorothioate-linked oligonucleotide. In some embodiments, the compound is the hexatetracontapotassium salt of a 47-nucleotide (47-mer), fully phosphorothioate-linked oligonucleotide. In some embodiments, the compound is the heptatetracontapotassium salt of a 48-nucleotide (48-mer), fully phosphorothioate-linked oligonucleotide. In some embodiments, the compound is the octatetracontapotassium salt of a 49-nucleotide (49-mer), fully phosphorothioate-linked oligonucleotide. In some embodiments, the compound is the nonatetracontapotassium salt of a 50-nucleotide (50-mer), fully phosphorothioate-linked oligonucleotide. In some embodiments, the compound is the pentacontapotassium salt of a 51-nucleotide (51-mer), fully phosphorothioate-linked oligonucleotide.

### SCN1A

[0260] The SCN1A gene can encode SCN1A (sodium channel, voltage-gated, type I, alpha subunit) protein, which can also be referred to as alpha-subunit of voltage-gated sodium channel Na_{V}1.1. Also described above, SCN1A mutations in DS are spread across the entire protein. More than 100 novel mutations have been identified throughout the gene with the more debilitating arising de novo. These comprise of truncations (47%), missense (43%), deletions (3%), and splice site mutations (7%). The percentage of subjects carrying SCN1A mutations varies between 33 and 100%. The majority of mutations are novel changes (88%).

[0261] In some embodiments, the methods described herein are used to modulate, e.g., increase or decrease, the production of a functional Na_{V}1.1 protein. As used herein, the term “functional” refers to the amount of activity or function of a Na_{V}1.1 protein that is necessary to eliminate any one or more symptoms of a treated condition, e.g., Dravet syndrome; Epilepsy, generalized, with febrile seizures plus, type 2; Febrile seizures, familial, 3A; Autism; Epileptic encephalopathy, early infantile, 13; Sick sinus syndrome 1; Alzheimer's disease; or SUDEP. In some embodiments, the methods are used to increase the production of a partially functional Na_{V}1.1 protein. As used herein, the term “partially functional” refers to any amount of activity or function of the Na_{V}1.1 protein that is less than the amount of activity or function that is necessary to eliminate or prevent any one or more symptoms of a disease or condition. In some embodiments, a partially functional protein or RNA will have at least 10%, at least 20%, at least 30%, at least 40%, at least 50%, at least 60%, at least 70%, at least 75%, at least 80%, at least 85%, at least 90%, or at least 95% less activity relative to the fully functional protein or RNA.

[0262] In some embodiments, the method is a method of increasing the expression of the Na_{V}1.1 protein by cells of a subject having a NIE containing pre-mRNA encoding the Na_{V}1.1 protein, wherein the human subject has Dravet syndrome characterized by a deficient amount of activity of Na_{V}1.1 protein, and wherein the deficient amount of the Na_{V}1.1 protein is characterized by haploinsufficiency of the Na_{V}1.1 protein. In such an embodiment, the human subject has a first allele encoding a functional Na_{V}1.1 protein, and a second allele from which the Na_{V}1.1 protein is not produced. In another such embodiment, the human subject has a first allele encoding a functional Na_{V}1.1 protein, and a second allele encoding a nonfunctional Na_{V}1.1 protein. In another such embodiment, the human subject has a first allele encoding a functional Na_{V}1.1 protein, and a second allele encoding a partially functional Na_{V}1.1 protein. In some embodiments, the human subject expresses a partially functional Na_{V}1.1 protein from one allele, wherein the partially functional Na_{V}1.1 protein is characterized by a frameshift mutation, a nonsense mutation, a missense mutation, or a partial gene deletion. In some embodiments, the human subject expresses a nonfunctional Na_{V}1.1 protein from one allele, wherein the nonfunctional Na_{V}1.1 protein is characterized by a frameshift mutation, a nonsense mutation, a missense mutation, a partial gene deletion, in one allele. In some embodiments, the human subject has a SCN1A whole gene deletion, in one allele. In any of these embodiments, the antisense oligomer binds to a targeted portion of the NIE containing pre-mRNA transcribed from the second allele, thereby inducing exon skipping of the pseudo-exon from the pre-mRNA, and causing an increase in the level of mature mRNA encoding functional Na_{V}1.1 protein, and an increase in the expression of the Na_{V}1.1 protein in the cells of the human subject.

[0263] In embodiments of the present invention, a subject can have a mutation in SCN1A. Mutations in SCN1A can be spread throughout said gene. Na_{V}1.1 protein can consist of four domains. Said SCN1A domains can have transmembrane segments. Mutations in said Na_{V}1.1 protein may arise throughout said protein. Said Na_{V}1.1 protein may consist of at least two isoforms. Mutations in SCN1A may comprise of R931C, R946C, M934I, R1648C, or R1648H. In some cases, mutations may be observed in a C-terminus of a Na_{V}1.1 protein. Mutations in a Na_{V}1.1 protein may also be found in loops between segments 5 and 6 of the first three domains of said Na_{V}1.1 protein. In some cases, mutations may be observed in an N-terminus of a Na_{V}1.1 protein. Exemplary mutations within SCN1A include, but are not limited to, R222X, R712X, I227S, R1892X, W952X, R1245X, R1407X, W1434R, c.4338+1G>A, 51516X, L1670fsX1678, or K1846fsX1856. Mutations that can be targeted with the present invention may also encode a pore of an ion channel.

[0264] In some embodiments, the methods and compositions described herein can be used to treat DS. In other embodiments, the methods and compositions described herein can be used to treat severe myclonic epilepsy of infancy (SMEI). In other embodiments, the methods and compositions described herein can be used to treat borderline Dravet syndrome; Epilepsy, generalized, with febrile seizures plus, type 2; Febrile seizures, familial, 3A; Migraine, familial hemiplegic, 3; Autism; Epileptic encephalopathy, early infantile, 13; Sick sinus syndrome 1; Alzheimer's disease or SUDEP.

[0265] In related embodiments, the method is a method of using a compound (e.g., compound (I) or a salt thereof, or compound (II)) to increase the expression of a protein or functional RNA. In some embodiments, a compound (e.g., compound (I) or a salt thereof, or compound (II)) is used to increase the expression of Na_{V}1.1 protein in cells of a subject having a NIE containing pre-mRNA encoding Na_{V}1.1 protein, wherein the human subject has a deficiency, e.g., Dravet Syndrome (DS) (also known as SMEI); severe myoclonic epilepsy of infancy (SMEI)-borderland (SMEB); Febrile seizure (FS); epilepsy, generalized, with febrile seizures plus (GEFS+); epileptic encephalopathy, early infantile, 13; cryptogenic generalized epilepsy; cryptogenic focal epilepsy; myoclonic-astatic epilepsy; Lennox-Gastaut syndrome; West syndrome; idiopathic spasms; early myoclonic encephalopathy; progressive myoclonic epilepsy; alternating hemiplegia of childhood; unclassified epileptic encephalopathy; sudden unexpected death in epilepsy (SUDEP); sick sinus syndrome 1; early infantile SCN1A encephalopathy; early infantile epileptic encephalopathy (EIEE); or autism, in the amount or function of a Na_{V}1.1 protein. In some embodiments, a compound (e.g., compound (I) or a salt thereof, or compound (II)) is used to increase the expression of Na_{V}1.1 protein in cells of a subject, wherein the human subject has a deficiency, e.g., Epileptic encephalopathy, early infantile, 13; in the amount or function of a SCN8A protein. In some embodiments, a compound (e.g., compound (I) or a salt thereof, or compound (II)) is used to increase the expression of Na_{V}1.1 protein in cells of a subject, wherein the human subject has a deficiency, e.g., Sick sinus syndrome 1; in the amount or function of a SCN5A protein.

[0266] In some embodiments, the methods and compositions described herein can also be used to treat borderline SMEI. Additionally, the methods and compositions described herein can be used to treat generalized epilepsy with febrile seizures plus (GEFS+). GEFS+ may be associated with mutations in epilepsy-associated ion channel subunits such as SCN1B or GABRG2. The methods and compositions described herein can also be used to treat sodium channelopathies. Sodium channelopathies may be associated with mutations in SCN1A. Sodium channelopathies may also be associated with subunits of SCN1A, such as the beta subunit, SCN1B. In some cases, additional diseases associated with SCN1A mutations may also be treated with the present disclosure. Related SCN1A diseases associated with SCN1A mutations include, but are not limited to, atypical myotonia congenita, hyperkalemic periodic paralysis, and paramyotonia congenita.

[0267] In some embodiments, a subject having any SCN1A mutation known in the art and described in the literature (e.g., by Hamdan, et al., 2009, N. Engl. Med. 360 (6) pp. 599, Mulley, et al., 2005, Hum. Muta. 25, 535-542, of which entire content is incorporated herein by reference) can be treated using the methods and compositions described herein. In some embodiments, the mutation is within any SCN1A intron or exon.

[0268] In some embodiments, the NIE containing pre-mRNA transcript that encodes the protein that is causative of the disease or condition is targeted by the ASOs described herein (e.g., compound (I) or a salt thereof, or compound (II)). In some embodiments, a NIE containing pre-mRNA transcript that encodes a protein that is not causative of the disease is targeted by the ASOs. For example, a disease that is the result of a mutation or deficiency of a first protein in a particular pathway may be ameliorated by targeting a NIE containing pre-mRNA that encodes a second protein, thereby increasing production of the second protein. In some embodiments, the function of the second protein is able to compensate for the mutation or deficiency of the first protein (which is causative of the disease or condition).

[0269] In some embodiments, the human subject has:
[0270] (a) a first mutant allele from which (i) the Na_{V}1.1 protein is produced at a reduced level compared to production from a wild-type allele, (ii) the Na_{V}1.1 protein is produced in a form having reduced function compared to an equivalent wild-type protein, or (iii) the Na_{V}1.1 protein or functional RNA is not produced; and
[0271] (b) a second mutant allele from which (i) the Na_{V}1.1 protein is produced at a reduced level compared to production from a wild-type allele, (ii) the Na_{V}1.1 protein is produced in a form having reduced function compared to an equivalent wild-type protein, or (iii) the Na_{V}1.1 protein is not produced, and wherein the NIE containing pre-mRNA is transcribed from the first allele and/or the second allele. In these embodiments, the compound (e.g., compound (I) or a salt thereof, or compound (II)) binds to a targeted portion of the NIE containing pre-mRNA transcribed from the first allele or the second allele, thereby inducing exon skipping of the pseudo-exon from the NIE containing pre-mRNA, and causing an increase in the level of mRNA encoding NaV1.1 protein and an increase in the expression of the target protein or functional RNA in the cells of the human subject. In these embodiments, the target protein or functional RNA having an increase in expression level resulting from the exon skipping of the pseudo-exon from the NIE containing pre-mRNA is either in a form having reduced function compared to the equivalent wild-type protein (partially functional), or having full function compared to the equivalent wild-type protein (fully functional).

[0272] In some embodiments, the level of mRNA encoding Na_{V}1.1 protein is increased 1.1 to 10-fold, when compared to the amount of mRNA encoding Na_{V}1.1 protein that is produced in a control cell, e.g., one that is not treated with the antisense oligomer or one that is treated with an antisense oligomer that does not bind to the targeted portion of the SCN1A NIE containing pre-mRNA.

[0273] In some embodiments, a subject treated using the methods of the present disclosure expresses a mutant Na_{V}1.1 protein from one allele, wherein the mutant Na_{V}1.1 protein is characterized by a frameshift mutation, a nonsense mutation, a missense mutation, or a partial gene deletion, and wherein the mutant Na_{V}1.1 protein causes an elevated activity level of Na_{V}1.1. In some embodiments, a subject treated using the methods of the present disclosure expresses an elevated amount of Na_{V}1.1 protein from one allele due to a frameshift mutation, a nonsense mutation, a missense mutation, or a partial gene deletion.

[0274] In some embodiments, a subject treated using the methods of the present disclosure expresses a partially functional Na_{V}1.1 protein from one allele, wherein the partially functional Na_{V}1.1 protein is characterized by a frameshift mutation, a nonsense mutation, a missense mutation, or a partial gene deletion. In some embodiments, a subject treated using the methods of the disclosure expresses a nonfunctional Na_{V}1.1 protein from one allele, wherein the nonfunctional Na_{V}1.1 protein is characterized by a frameshift mutation, a nonsense mutation, a missense mutation, a partial gene deletion, in one allele. In some embodiments, a subject treated using the methods of the disclosure has a SCN1A whole gene deletion, in one allele.

[0275] In some embodiments, the method is a method of decreasing the expression of the Na_{V}1.1 protein by cells of a subject having a NIE containing pre-mRNA encoding the Na_{V}1.1 protein, and wherein the human subject has a gain-of-function mutation in Na_{V}1.1. In such an embodiment, the human subject has an allele from which the Na_{V}1.1 protein is produced in an elevated amount or an allele encoding a mutant SCN1A that induces increased activity of Na_{V}1.1 in the cell. In some embodiments, the increased activity of Na_{V}1.1 is characterized by a prolonged or near persistent sodium current mediated by the mutant Na_{V}1.1 channel, a slowing of fast inactivation, a positive shift in steady-state inactivation, higher channel availability during repetitive stimulation, increased non-inactivated depolarization-induced persistent sodium currents, delayed entry into inactivation, accelerated recovery from fast inactivation, and/or rescue of folding defects by incubation at lower temperature or co-expression of interacting proteins.

### Target Transcripts

[0276] Splicing of the identified SCN1A NIE pre-mRNA species to produce functional mature Scn1a mRNA can be induced using a therapeutic agent such as a compound (e.g., an ASO) that stimulates exon skipping of an NIE. Induction of exon skipping can result in inhibition of an NMD pathway. The resulting mature Scn1a mRNA can be translated normally without activating NMD pathway, thereby increasing the amount of Na_{V}1.1 protein in the patient's cells and alleviating symptoms of a condition associated with SCN1A deficiency, such as Dravet Syndrome (DS); Epilepsy, generalized, with febrile seizures plus, type 2; Febrile seizures, familial, 3A; Autism; Epileptic encephalopathy, early infantile, 13; Sick sinus syndrome 1; Alzheimer's disease; or SUDEP.

[0277] In various embodiments, the present disclosure provides a therapeutic agent which can target SCN1A pre-mRNA transcripts to modulate, e.g., enhance or inhibit, splicing or protein expression level. The therapeutic agent can be a small molecule, polynucleotide, or polypeptide. In some embodiments, the therapeutic agent is a compound (e.g., compound (I) or a salt thereof, or compound (II)). Various regions or sequences on the SCN1A pre-mRNA can be targeted by a therapeutic agent, such as an ASO. In some embodiments, the compound (e.g., compound (I) or a salt thereof, or compound (II)) targets a SCN1A pre-mRNA transcript containing an NIE. In some embodiments, the compound (e.g., compound (I) or a salt thereof, or compound (II)) targets a sequence within an NIE of a SCN1A pre-mRNA transcript. In some embodiments, the compound targets a sequence upstream (or 5′) from the 5′ end of an NIE (3′ss) of a SCN1A pre-mRNA transcript. In some embodiments, the compound targets a sequence downstream (or 3′) from 3′ end of an NIE (5′ss) of a SCN1A pre-mRNA transcript. In some embodiments, the compound targets a sequence that is within an intron flanking on 5′ end of the NIE of a SCN1A pre-mRNA transcript. In some embodiments, the compound targets a sequence that is within an intron flanking 3′ end of the NIE of a SCN1A pre-mRNA transcript. In some embodiments, the compound targets a sequence comprising an NIE-intron boundary of a SCN1A pre-mRNA transcript. An NIE-intron boundary can refer to the junction of an intron sequence and an NIE region. The intron sequence can flank 5′ end of the NIE, or 3′ end of the NIE. In some embodiments, the compound targets a sequence within an exon of a SCN1A pre-mRNA transcript. In some embodiments, the compound targets a sequence within an intron of a SCN1A pre-mRNA transcript. In some embodiments, the compound targets a sequence comprising both a portion of an intron and a portion of an exon.

[0278] In some embodiments, a therapeutic agent described herein modulates binding of a factor involved in splicing of the pre-mRNA containing an NMD exon. In some embodiments, a therapeutic agent described herein interferes with binding of a factor involved in splicing of the pre-mRNA containing an NMD exon. In some embodiments, a therapeutic agent described herein prevents binding of a factor involved in splicing of the pre-mRNA containing an NMD exon. In some embodiments, a therapeutic agent targets a targeted portion located in an intronic region between two canonical exonic regions of the pre-mRNA containing an NMD exon and encoding Na_{V}1.1, and wherein the intronic region contains the NMD exon. In some embodiments, a therapeutic agent targets a targeted portion at least partially overlaps with the NMD exon. In some embodiments, a therapeutic agent targets a targeted portion that is at least partially overlaps with an intron upstream of the NMD exon. In some embodiments, a therapeutic agent targets a targeted portion within the NMD exon.

[0279] In some embodiments, a therapeutic agent targets a targeted portion comprising at least about 5, 6, 7, 8, 9, 10, 11, 12, 13, 14, 15, 16, 17, 18, 19, 20, 21, 22, 23, 24, 25, 26, 27, 28, 29, 30, or more consecutive nucleotides of the NMD exon. In some embodiments, a therapeutic agent targets a targeted portion comprising at most about 5, 6, 7, 8, 9, 10, 11, 12, 13, 14, 15, 16, 17, 18, 19, 20, 21, 22, 23, 24, 25, 26, 27, 28, 29, 30, or more consecutive nucleotides of the NMD exon. In some embodiments, a therapeutic agent targets a targeted portion comprising about 5, 6, 7, 8, 9, 10, 11, 12, 13, 14, 15, 16, 17, 18, 19, 20, 21, 22, 23, 24, 25, 26, 27, 28, 29, 30, or more consecutive nucleotides of the NMD exon.

[0280] In some embodiments, a therapeutic agent targets a targeted portion proximal to the NMD exon.

[0281] In some embodiments, the compound targets a sequence from about 4 to about 300 nucleotides upstream (or 5′) from the 5′ end of the NIE. In some embodiments, the compound targets a sequence from about 1 to about 20 nucleotides, about 20 to about 50 nucleotides, about 50 to about 100 nucleotides, about 100 to about 150 nucleotides, about 150 to about 200 nucleotides, about 200 to about 250 nucleotides, about 250 to about 300, about 250 to about 300 nucleotides, about 350 to about 400 nucleotides, about 450 to about 500 nucleotides, about 550 to about 600 nucleotides, about 650 to about 700 nucleotides, about 750 to about 800 nucleotides, about 850 to about 900 nucleotides, about 950 to about 1000 nucleotides, about 1050 to about 1100 nucleotides, about 1150 to about 1200 nucleotides, about 1250 to about 1300 nucleotides, about 1350 to about 1400 nucleotides, or about 1450 to about 1500 nucleotides upstream (or 5′) from the 5′ end of the NIE region. In some embodiments, the compound may target a sequence more than 300 nucleotides upstream from the 5′ end of the NIE. In some embodiments, the compound targets a sequence from about 4 to about 300 nucleotides downstream (or 3′) from 3′ end of the NIE. In some embodiments, the compound targets a sequence about 1 to about 20 nucleotides, about 20 to about 50 nucleotides, about 50 to about 100 nucleotides, about 100 to about 150 nucleotides, about 150 to about 200 nucleotides, about 200 to about 250 nucleotides, about 250 to about 300 nucleotides, about 350 to about 400 nucleotides, about 450 to about 500 nucleotides, about 550 to about 600 nucleotides, about 650 to about 700 nucleotides, about 750 to about 800 nucleotides, about 850 to about 900 nucleotides, about 950 to about 1000 nucleotides, about 1050 to about 1100 nucleotides, about 1150 to about 1200 nucleotides, about 1250 to about 1300 nucleotides, about 1350 to about 1400 nucleotides, or about 1450 to about 1500 nucleotides downstream from 3′ end of the NIE. In some embodiments, the compound targets a sequence more than 300 nucleotides downstream from 3′ end of the NIE.

[0282] In some embodiments, the compound targets a sequence from about 4 to about 300 nucleotides upstream (or 5′) from the 5′ end of the NIE. In some embodiments, the compound targets a sequence at least about 1 nucleotide, at least about 10 nucleotides, at least about 20 nucleotides, at least about 50 nucleotides, at least about 80 nucleotides, at least about 85 nucleotides, at least about 90 nucleotides, at least about 95 nucleotides, at least about 96 nucleotides, at least about 97 nucleotides, at least about 98 nucleotides, at least about 99 nucleotides, at least about 100 nucleotides, at least about 101 nucleotides, at least about 102 nucleotides, at least about 103 nucleotides, at least about 104 nucleotides, at least about 105 nucleotides, at least about 110 nucleotides, at least about 120 nucleotides, at least about 150 nucleotides, at least about 200 nucleotides, at least about 300 nucleotides, at least about 400 nucleotides, at least about 500 nucleotides, at least about 600 nucleotides, at least about 700 nucleotides, at least about 800 nucleotides, at least about 900 nucleotides, or at least about 1000 nucleotides upstream (or 5′) from the 5′ end of the NIE region. In some embodiments, the compound targets a sequence about 4 to about 300 nucleotides downstream (or 3′) from 3′ end of the NIE. In some embodiments, the compound targets a sequence at least about 1 nucleotide, at least about 10 nucleotides, at least about 20 nucleotides, at least about 50 nucleotides, at least about 80 nucleotides, at least about 85 nucleotides, at least about 90 nucleotides, at least about 95 nucleotides, at least about 96 nucleotides, at least about 97 nucleotides, at least about 98 nucleotides, at least about 99 nucleotides, at least about 100 nucleotides, at least about 101 nucleotides, at least about 102 nucleotides, at least about 103 nucleotides, at least about 104 nucleotides, at least about 105 nucleotides, at least about 110 nucleotides, at least about 120 nucleotides, at least about 150 nucleotides, at least about 200 nucleotides, at least about 300 nucleotides, at least about 400 nucleotides, at least about 500 nucleotides, at least about 600 nucleotides, at least about 700 nucleotides, at least about 800 nucleotides, at least about 900 nucleotides, or at least about 1000 nucleotides downstream from the 3′ end of the NIE. In some embodiments, the compound targets a sequence more than 300 nucleotides downstream from 3′ end of the NIE.

[0283] In some embodiments, the compound targets a sequence from about 4 to about 300 nucleotides upstream (or 5′) from the 5′ end of the NIE. In some embodiments, the compound targets a sequence at most about 10 nucleotides, at most about 20 nucleotides, at most about 50 nucleotides, at most about 80 nucleotides, at most about 85 nucleotides, at most about 90 nucleotides, at most about 95 nucleotides, at most about 96 nucleotides, at most about 97 nucleotides, at most about 98 nucleotides, at most about 99 nucleotides, at most about 100 nucleotides, at most about 101 nucleotides, at most about 102 nucleotides, at most about 103 nucleotides, at most about 104 nucleotides, at most about 105 nucleotides, at most about 110 nucleotides, at most about 120 nucleotides, at most about 150 nucleotides, at most about 200 nucleotides, at most about 300 nucleotides, at most about 400 nucleotides, at most about 500 nucleotides, at most about 600 nucleotides, at most about 700 nucleotides, at most about 800 nucleotides, at most about 900 nucleotides, at most about 1000 nucleotides, at most about 1100 nucleotides, at most about 1200 nucleotides, at most about 1300 nucleotides, at most about 1400 nucleotides, or at most about 1500 nucleotides upstream (or 5′) from the 5′ end of the NIE region. In some embodiments, the compound targets a sequence about 4 to about 300 nucleotides downstream (or 3′) from 3′ end of the NIE. In some embodiments, the compound targets a sequence at most about 10 nucleotides, at most about 20 nucleotides, at most about 50 nucleotides, at most about 80 nucleotides, at most about 85 nucleotides, at most about 90 nucleotides, at most about 95 nucleotides, at most about 96 nucleotides, at most about 97 nucleotides, at most about 98 nucleotides, at most about 99 nucleotides, at most about 100 nucleotides, at most about 101 nucleotides, at most about 102 nucleotides, at most about 103 nucleotides, at most about 104 nucleotides, at most about 105 nucleotides, at most about 110 nucleotides, at most about 120 nucleotides, at most about 150 nucleotides, at most about 200 nucleotides, at most about 300 nucleotides, at most about 400 nucleotides, at most about 500 nucleotides, at most about 600 nucleotides, at most about 700 nucleotides, at most about 800 nucleotides, at most about 900 nucleotides, or at most about 1000 nucleotides, at most about 1100 nucleotides, at most about 1200 nucleotides, at most about 1300 nucleotides, at most about 1400 nucleotides, or at most about 1500 nucleotides downstream from 3′ end of the NIE. In some embodiments, the compound targets a sequence more than 300 nucleotides downstream from 3′ end of the NIE.

[0284] In some embodiments, the NIE as described herein is located between GRCh37/hg19: Chr2:166,863,740 and GRCh37/hg19: Chr2:166,863,803, as depicted in FIG. 2. In some embodiments, 5′ end of the NIE is located at GRCh37/hg19: Chr2:166,863,803. In some embodiments, 3′ end of the NIE is located at GRCh37/hg19: Chr2:166, 863, 740.

[0285] In some embodiments, the compound targets a sequence from about 4 to about 300 nucleotides upstream (or 5′) from genomic site GRCh37/hg19: Chr2:166,863,803. In some embodiments, the compound targets a sequence about 1 to about 20 nucleotides, about 20 to about 50 nucleotides, about 50 to about 100 nucleotides, about 100 to about 150 nucleotides, about 150 to about 200 nucleotides, about 200 to about 250 nucleotides, about 250 to about 300, about 250 to about 300 nucleotides, about 350 to about 400 nucleotides, about 450 to about 500 nucleotides, about 550 to about 600 nucleotides, about 650 to about 700 nucleotides, about 750 to about 800 nucleotides, about 850 to about 900 nucleotides, about 950 to about 1000 nucleotides, about 1050 to about 1100 nucleotides, about 1150 to about 1200 nucleotides, about 1250 to about 1300 nucleotides, about 1350 to about 1400 nucleotides, or about 1450 to about 1500 nucleotides upstream (or 5′) from genomic site GRCh37/hg19: Chr2:166,863,803. In some embodiments, the compound may target a sequence more than 300 nucleotides upstream from genomic site GRCh37/hg19: Chr2:166,863,803. In some embodiments, the compound targets a sequence from about 4 to about 300 nucleotides downstream (or 3′) from GRCh37/hg19: Chr2:166,863,740. In some embodiments, the compound targets a sequence about 1 to about 20 nucleotides, about 20 to about 50 nucleotides, about 50 to about 100 nucleotides, about 100 to about 150 nucleotides, about 150 to about 200 nucleotides, about 200 to about 250 nucleotides, about 250 to about 300 nucleotides, about 350 to about 400 nucleotides, about 450 to about 500 nucleotides, about 550 to about 600 nucleotides, about 650 to about 700 nucleotides, about 750 to about 800 nucleotides, about 850 to about 900 nucleotides, about 950 to about 1000 nucleotides, about 1050 to about 1100 nucleotides, about 1150 to about 1200 nucleotides, about 1250 to about 1300 nucleotides, about 1350 to about 1400 nucleotides, or about 1450 to about 1500 nucleotides downstream from GRCh37/hg19: Chr2:166,863,740. In some embodiments, the compound targets a sequence more than 300 nucleotides downstream from GRCh37/hg19: Chr2:166,863,740.

[0286] In some embodiments, the compound targets a sequence from about 4 to about 300 nucleotides upstream (or 5′) from genomic site GRCh37/hg19: Chr2:166,863,803. In some embodiments, the compound targets a sequence at least about 1 nucleotide, at least about 10 nucleotides, at least about 20 nucleotides, at least about 50 nucleotides, at least about 80 nucleotides, at least about 85 nucleotides, at least about 90 nucleotides, at least about 95 nucleotides, at least about 96 nucleotides, at least about 97 nucleotides, at least about 98 nucleotides, at least about 99 nucleotides, at least about 100 nucleotides, at least about 101 nucleotides, at least about 102 nucleotides, at least about 103 nucleotides, at least about 104 nucleotides, at least about 105 nucleotides, at least about 110 nucleotides, at least about 120 nucleotides, at least about 150 nucleotides, at least about 200 nucleotides, at least about 300 nucleotides, at least about 400 nucleotides, at least about 500 nucleotides, at least about 600 nucleotides, at least about 700 nucleotides, at least about 800 nucleotides, at least about 900 nucleotides, or at least about 1000 nucleotides upstream (or 5′) from genomic site GRCh37/hg19: Chr2:166,863,803. In some embodiments, the compound targets a sequence from about 4 to about 300 nucleotides downstream (or 3′) from GRCh37/hg19: Chr2:166,863,740. In some embodiments, the compound targets a sequence at least about 1 nucleotide, at least about 10 nucleotides, at least about 20 nucleotides, at least about 50 nucleotides, at least about 80 nucleotides, at least about 85 nucleotides, at least about 90 nucleotides, at least about 95 nucleotides, at least about 96 nucleotides, at least about 97 nucleotides, at least about 98 nucleotides, at least about 99 nucleotides, at least about 100 nucleotides, at least about 101 nucleotides, at least about 102 nucleotides, at least about 103 nucleotides, at least about 104 nucleotides, at least about 105 nucleotides, at least about 110 nucleotides, at least about 120 nucleotides, at least about 150 nucleotides, at least about 200 nucleotides, at least about 300 nucleotides, at least about 400 nucleotides, at least about 500 nucleotides, at least about 600 nucleotides, at least about 700 nucleotides, at least about 800 nucleotides, at least about 900 nucleotides, or at least about 1000 nucleotides downstream from GRCh37/hg19: Chr2:166,863,740. In some embodiments, the compound targets a sequence more than 300 nucleotides downstream from GRCh37/hg19: Chr2:166,863,740.

[0287] In some embodiments, the compound targets a sequence from about 4 to about 300 nucleotides upstream (or 5′) from genomic site GRCh37/hg19: Chr2:166,863,803. In some embodiments, the compound targets a sequence at most about 10 nucleotides, at most about 20 nucleotides, at most about 50 nucleotides, at most about 80 nucleotides, at most about 85 nucleotides, at most about 90 nucleotides, at most about 95 nucleotides, at most about 96 nucleotides, at most about 97 nucleotides, at most about 98 nucleotides, at most about 99 nucleotides, at most about 100 nucleotides, at most about 101 nucleotides, at most about 102 nucleotides, at most about 103 nucleotides, at most about 104 nucleotides, at most about 105 nucleotides, at most about 110 nucleotides, at most about 120 nucleotides, at most about 150 nucleotides, at most about 200 nucleotides, at most about 300 nucleotides, at most about 400 nucleotides, at most about 500 nucleotides, at most about 600 nucleotides, at most about 700 nucleotides, at most about 800 nucleotides, at most about 900 nucleotides, at most about 1000 nucleotides, at most about 1100 nucleotides, at most about 1200 nucleotides, at most about 1300 nucleotides, at most about 1400 nucleotides, or at most about 1500 nucleotides upstream (or 5′) from genomic site GRCh37/hg19: Chr2:166,863,803. In some embodiments, the compound targets a sequence from about 4 to about 300 nucleotides downstream (or 3′) from GRCh37/hg19: Chr2:166,863,740. In some embodiments, the compound targets a sequence at most about 10 nucleotides, at most about 20 nucleotides, at most about 50 nucleotides, at most about 80 nucleotides, at most about 85 nucleotides, at most about 90 nucleotides, at most about 95 nucleotides, at most about 96 nucleotides, at most about 97 nucleotides, at most about 98 nucleotides, at most about 99 nucleotides, at most about 100 nucleotides, at most about 101 nucleotides, at most about 102 nucleotides, at most about 103 nucleotides, at most about 104 nucleotides, at most about 105 nucleotides, at most about 110 nucleotides, at most about 120 nucleotides, at most about 150 nucleotides, at most about 200 nucleotides, at most about 300 nucleotides, at most about 400 nucleotides, at most about 500 nucleotides, at most about 600 nucleotides, at most about 700 nucleotides, at most about 800 nucleotides, at most about 900 nucleotides, or at most about 1000 nucleotides, at most about 1100 nucleotides, at most about 1200 nucleotides, at most about 1300 nucleotides, at most about 1400 nucleotides, or at most about 1500 nucleotides downstream from GRCh37/hg19: Chr2:166,863,740. In some embodiments, the compound targets a sequence more than 300 nucleotides downstream from GRCh37/hg19: Chr2:166,863, 740.

[0288] The SCN1A gene (SEQ ID NO: 1) was analyzed for NIE and inclusion of a portion of intron 20 (SEQ ID NO: 4) (this portion is referred as exon 20x throughout the present disclosure) was observed. In some embodiments, the compounds (e.g., ASOs) disclosed herein target a NIE containing pre-mRNA (SEQ ID NO: 2) transcribed from a SCN1A genomic sequence. In some embodiments, the compound targets a NIE containing pre-mRNA transcript from a SCN1A genomic sequence comprising a portion of intron 20. In some embodiments, the compound targets a NIE containing pre-mRNA transcript from a SCN1A genomic sequence comprising exon 20x (SEQ ID NO: 6). In some embodiments, the compound targets a NIE containing pre-mRNA transcript of SEQ ID NO: 2 or 12. In some embodiments, the compound targets a NIE containing pre-mRNA transcript of SEQ ID NO: 2 or 12 comprising an NIE. In some embodiments, the compound targets a NIE containing pre-mRNA transcript of SEQ ID NO: 2 comprising exon 20x (SEQ ID NO: 10). In some embodiments, the compounds disclosed herein target a SCN1A pre-mRNA sequence (SEQ ID NO: 2 or 12). In some embodiments, the compound targets a SCN1A pre-mRNA sequence comprising an NIE (SEQ ID NO: 10 or 20). In some embodiments, the compound targets a SCN1A pre-mRNA sequence according to any one of SEQ ID NOs: 7-10 or 17-20. In some embodiments, the ASO has a sequence according to any one of SEQ ID NOs: 21-67. In some embodiments, the ASO has a sequence according to any one of SEQ ID NOs: 68-114. In some embodiments, the ASO has a sequence according to any one of SEQ ID NOs: 115-209. In some embodiments, the ASO has a sequence according to any one of SEQ ID NOs: 210-256. In some embodiments, the ASO has a sequence according to any one of SEQ ID NOs: 257-303. In some embodiments, the ASO has a sequence according to any one of SEQ ID NOs: 304-341. In some embodiments, the ASO has a sequence according to any one of SEQ ID NOs: 342-379. In some embodiments, the ASO has a sequence according to any one of SEQ ID NOs: 380-1099. In some embodiments, the ASO has a sequence according to any one of SEQ ID NOs: 304-1099. In some embodiments, the ASO has a sequence according to any one of the sequences listed in listed in Tables 4A, 4B, 5A, 5B, 6A, 6B, 7, 8A, and 8B.

[0289] In some embodiments, the SCN1A NIE containing pre-mRNA transcript is encoded by a genetic sequence with at least about 80%, 85%, 90%, 95%, 96%, 97%, 98%, 99% or 100% sequence identity to SEQ ID NO: 1 or 11. In some embodiments, the SCN1A NIE pre-mRNA transcript comprises a sequence with at least about 80%, 85%, 90%, 95%, 96%, 97%, 98%, 99% or 100% sequence identity to any one of SEQ ID NOs: 2-10 and 12-20.

[0290] In some embodiments, the compound targets exon 20 of a SCN1A NIE containing pre-mRNA comprising NIE exon 20x. In some embodiments, the compound targets an exon 21 sequence downstream (or 3′) of NIE exon 20x. In some embodiments, the compound targets a sequence about 4 to about 300 nucleotides upstream (or 5′) from the 5′ end of exon 20x. In some embodiments, the compound targets a sequence about 4 to about 300 nucleotides downstream (or 3′) from 3′ end of exon 20x. In some embodiments, the ASO has a sequence according to any one of SEQ ID NOs: 21-67. In some embodiments, the ASO has a sequence according to any one of SEQ ID NOs: 210-256. In some embodiments, the ASO has a sequence according to any one of SEQ ID NOs: 380-1099. In some embodiments, the ASO has a sequence according to any one of SEQ ID NOs: 304-1099. In some embodiments, the ASO has a sequence according to any one of the sequences listed in listed in Tables 4A, 4B, 5A, 5B, 6A, 6B, 7, 8A, and 8B.

[0291] In some embodiments, the compound targets a sequence upstream from the 5′ end of an NIE. For example, compounds (e.g., ASOs) targeting a sequence upstream from the 5′ end of an NIE (e.g., exon 20x in human SCN1A, or exon 21x in mouse SCN1A) can comprise a sequence with at least 80%, 85%, 90%, 95%, 97%, or 100% sequence identity to any one of SEQ ID NOs: 21-38. For another example, compounds (e.g., ASOs) targeting a sequence upstream from the 5′ end of an NIE (e.g., exon 20x in human SCN1A, or exon 21x in mouse SCN1A) can comprise a sequence with at least 80%, 85%, 90%, 95%, 97%, or 100% sequence identity to any one of SEQ ID NOs: 68-85. In some embodiments, the compounds target a sequence containing an exon-intron boundary (or junction). For example, compounds targeting a sequence containing an exon-intron boundary can comprise a sequence with at least 80%, 85%, 90%, 95%, 97%, or 100% sequence identity to any one of SEQ ID NOs: 39-41, 51, 52, 228-230, 240, or 241. For another example, compounds targeting a sequence containing an exon-intron boundary can comprise a sequence with at least 80%, 85%, 90%, 95%, 97%, or 100% sequence identity to any one of SEQ ID NOs: 86-88 and 98-99. In some embodiments, the compounds target a sequence downstream from 3′ end of an NIE. For example, compounds targeting a sequence down-stream from the 3′ end of an NIE (e.g., exon 20x in human SCN1A, or exon 21x in mouse SCN1A) can comprise a sequence with at least 80%, 85%, 90%, 95%, 97%, or 100% sequence identity to any one of SEQ ID NOs: 53-67. For another example, compounds targeting a sequence downstream from the 3′ end of an NIE (e.g., exon 20x in human SCN1A, or exon 21x in mouse SCN1A) can comprise a sequence with at least 80%, 85%, 90%, 95%, 97%, or 100% sequence identity to any one of SEQ ID NOs: 100-114. In some embodiments, compounds target a sequence within an NIE. For example, compounds targeting a sequence within an NIE (e.g., exon 20x in human SCN1A, or exon 21x in mouse SCN1A) can comprise a sequence with at least 80%, 85%, 90%, 95%, 97%, or 100% sequence identity to any one of SEQ ID NOs: 42-50, or 231-239. For another example, compounds targeting a sequence within an NIE (e.g., exon 20x in human SCN1A, or exon 21x in mouse SCN1A) can comprise a sequence with at least 80%, 85%, 90%, 95%, 97%, or 100% sequence identity to any one of SEQ ID NOs: 89-97.

[0292] In some embodiments, the compound (e.g., compound (I) or a salt thereof, or compound (II)) targets exon 20x in a SCN1A NIE containing pre-mRNA comprising exon 20x. In some embodiments, the compound targets an exon 20x sequence downstream (or 3′) from the 5′ end of the exon 20x of a SCN1A pre-mRNA. In some embodiments, the compound targets an exon 20x sequence upstream (or 5′) from 3′ end of the exon 20x of a SCN1A pre-mRNA.

[0293] In some embodiments, the SCN1A NIE containing pre-mRNA transcript comprises a sequence with at least about 80%, 85%, 90%, 95%, 97%, or 100% sequence identity to any one of SEQ ID NOs: 2, 7-10, 12, and 17-20. In some embodiments, SCN1A NIE containing pre-mRNA transcript is encoded by a sequence with at least about 80%, 85%, 90%, 95%, 97%, or 100% sequence identity to SEQ ID NOs: 1, 3-6, 11, and 13-16. In some embodiments, the targeted portion of the pre-mRNA containing an NMD exon and encoding Na_{V}1.1 comprises a sequence with at least 80%, 85%, 90%, 95%, 97%, or 100% sequence identity to a region comprising at least 8 contiguous nucleic acids of SEQ ID NOs: 2, 7-10, 12, and 17-20.

[0294] In some embodiments, the ASO targets a NIE containing pre-mRNA transcript. In some embodiments, the ASO targets a NIE containing pre-mRNA transcript comprising an NIE. In some embodiments, the ASO targets a NIE containing pre-mRNA transcript of comprising exon 20x. In some embodiments, the ASOs disclosed herein target a SCN1A pre-mRNA sequence. In some embodiments, the ASO targets a SCN1A pre-mRNA sequence comprising an NIE. In some embodiments, the ASO targets a SCN1A pre-mRNA sequence. In some embodiments, the ASO has a sequence according to any one of SEQ ID NOs: 21-67, 210-256 or 304-1099. For another example, the ASOs comprise a sequence with at least 80%, 85%, 90%, 95%, 97%, or 100% sequence identity to any one of SEQ ID NOs: 21-67, 210-256 or 304-1099. For another example, the ASOs comprise a sequence with at least 80%, 85%, 90%, 95%, 97%, or 100% sequence identity to any one of the sequences listed in listed in Tables 4A, 4B, 5A, 5B, 6A, 6B, 7, 8A, and 8B.

[0295] In some embodiments, the ASO targets exon 20 of a SCN1A NIE containing pre-mRNA comprising NIE exon 20x. In some embodiments, the ASO targets an exon 21 sequence downstream (or 3′) of NIE exon 20x. In some embodiments, the ASO targets a sequence about 4 to about 300 nucleotides upstream (or 5′) from the 5′ end of exon 20x. In some embodiments, the ASO targets a sequence about 4 to about 300 nucleotides downstream (or 3′) from 3′ end of exon 20x.

[0296] In some embodiments, the ASO targets a sequence upstream from the 5′ end of an NIE. In some embodiments, the ASOs target a sequence containing an exon-intron boundary (or junction). In some embodiments, the ASOs target a sequence downstream from 3′ end of an NIE (e.g., exon 20x in human SCN1A, or exon 21x in mouse SCN1A). In some embodiments, ASOs target a sequence within an NIE.

[0297] In some embodiments, the ASO targets exon 20x in a SCN1A NIE containing pre-mRNA comprising exon 20x. In some embodiments, the ASO targets an exon 20x sequence downstream (or 3′) from the 5′ end of the exon 20x of a SCN1A pre-mRNA. In some embodiments, the ASO targets an exon 20x sequence upstream (or 5′) from 3′ end of the exon 20x of a SCN1A pre-mRNA.

[0298] In some embodiments, the targeted portion of the SCN1A NIE containing pre-mRNA is in intron 1, 2, 3, 4, 5, 6, 7, 8, 9, 10, 11, 12, 13, 14, 15, 16, 17, 18, 19, 20, 21, 22, 23, 24, or 25 (intron numbering corresponding to the mRNA sequence at NM_006920). In some embodiments, hybridization of an ASO to the targeted portion of the NIE pre-mRNA results in exon skipping of at least one of NIE within intron 1, 2, 3, 4, 5, 6, 7, 8, 9, 10, 11, 12, 13, 14, 15, 16, 17, 18, 19, 20, 21, 22, 23, 24, or 25, and subsequently increases Na_{V}1.1 protein production. In some embodiments, hybridization of an ASO to the targeted portion of the NIE pre-mRNA inhibits or blocks exon skipping of at least one of NIE within intron 1, 2, 3, 4, 5, 6, 7, 8, 9, 10, 11, 12, 13, 14, 15, 16, 17, 18, 19, 20, 21, 22, 23, 24, or 25, and subsequently decreases Na_{V}1.1 protein production. In some embodiments, the targeted portion of the SCN1A NIE containing pre-mRNA is in intron 20. One of skill in the art can determine the corresponding intron number in any isoform based on an intron sequence provided herein or using the number provided in reference to the mRNA sequence at NM_006920, NM_001202435, NM_001165964, or NM_001165963. One of skill in the art also can determine the sequences of flanking exons in any SCN1A isoform for targeting using the methods of the invention, based on an intron sequence provided herein or using the intron number provided in reference to the mRNA sequence at NM_006920, NM_001202435, NM_001165964, or NM_001165963.

### Therapeutic Agents

[0299] In various embodiments of the present disclosure, compositions and methods comprising a therapeutic agent are provided to modulate protein expression level of SCN1A. In some embodiments, provided herein are compositions and methods to modulate alternative splicing of SCNA1 pre-mRNA. In some embodiments, provided herein are compositions and methods to induce exon skipping in the splicing of SCN1A pre-mRNA, e.g., to induce skipping of a pseudo-exon during splicing of SCN1A pre-mRNA. In other embodiments, therapeutic agents may be used to induce the inclusion of an exon in order to decrease the protein expression level.

[0300] In some embodiments, a therapeutic agent disclosed herein is a small molecule, a polypeptide, or a polynucleic acid polymer. In some instances, the therapeutic agent is a small molecule. In some instances, the therapeutic agent is a polypeptide. In some instances, the therapeutic agent is a polynucleic acid polymer. In some cases, the therapeutic agent is a repressor agent. In additional cases, the therapeutic agent is an enhancer agent.

[0301] A therapeutic agent disclosed herein can be a NIE repressor agent. A therapeutic agent may comprise a polynucleic acid polymer.

[0302] According to one aspect of the present disclosure, provided herein is a method of treatment or prevention of a condition associated with a functional-Na_{V}1.1 protein deficiency, comprising administering a NIE repressor agent to a subject to increase levels of functional Na_{V}1.1 protein, wherein the agent binds to a region of the pre-mRNA transcript to decrease inclusion of the NIE in the mature transcript. For example, provided herein is a method of treatment or prevention of a condition associated with a functional-Na_{V}1.1 protein deficiency, comprising administering a NIE repressor agent to a subject to increase levels of functional Na_{V}1.1 protein, wherein the agent binds to a region of an intron containing an NIE (e.g., intron 20 in human SCN1A gene) of the pre-mRNA transcript or to a NIE-activating regulatory sequence in the same intron.

[0303] The sequence of the polynucleic acid polymer may be at least 50%, 55%, 60%, 65%, 70%, 75%, 80%, 85%, 90%, 91%, 92%, 93%, 94%, 95%, 96%, 97%, 98%, 99%, or 99.5% complementary to a target sequence of an mRNA transcript, e.g., a partially processed mRNA transcript. The sequence of the polynucleic acid polymer may be 100% complementary to a target sequence of a pre-mRNA transcript.

[0304] The sequence of the polynucleic acid polymer may have 4 or fewer mismatches to a target sequence of the pre-mRNA transcript. The sequence of the polynucleic acid polymer may have 3 or fewer mismatches to a target sequence of the pre-mRNA transcript. The sequence of the polynucleic acid polymer may have 2 or fewer mismatches to a target sequence of the pre-mRNA transcript. The sequence of the polynucleic acid polymer may have 1 or fewer mismatches to a tar-get sequence of the pre-mRNA transcript. The sequence of the polynucleic acid polymer may have no mismatches to a target sequence of the pre-mRNA transcript.

[0305] The polynucleic acid polymer may specifically hybridize to a target sequence of the pre-mRNA transcript. For example, the polynucleic acid polymer may have 91%, 92%, 93%, 94%, 95%, 96%, 97%, 98%, 99%, 99.5% or 100% sequence complementarity to a target sequence of the pre-mRNA transcript. The hybridization may be under high stringent hybridization conditions.

[0306] The polynucleic acid polymer may have a sequence with at least 50%, 55%, 60%, 65%, 70%, 75%, 80%, 85%, 90%, 91%, 92%, 93%, 94%, 95%, 96%, 97%, 98%, 99%, or 99.5% sequence identity to a sequence selected from the group consisting of SEQ ID NOs: 21-67. The polynucleic acid polymer may have a sequence with 100% sequence identity to a sequence selected from the group consisting of SEQ ID NOs: 21-67. In some instances, the polynucleic acid polymer may have a sequence with at least 50%, 55%, 60%, 65%, 70%, 75%, 80%, 85%, 90%, 91%, 92%, 93%, 94%, 95%, 96%, 97%, 98%, 99%, or 99.5% sequence identity to a sequence selected from the group consisting of SEQ ID NOs: 68-114. In some cases, the polynucleic acid polymer may have a sequence with 100% sequence identity to a sequence selected from the group consisting of SEQ ID NOs: 68-114.

[0307] In some instances, the polynucleic acid polymer may have a sequence with at least 50%, 55%, 60%, 65%, 70%, 75%, 80%, 85%, 90%, 91%, 92%, 93%, 94%, 95%, 96%, 97%, 98%, 99%, or 99.5% sequence identity to a sequence selected from the group consisting of SEQ ID NOs: 21-67, 210-256 or 304-1099. In some cases, the polynucleic acid polymer may have a sequence with 100% sequence identity to a sequence selected from the group consisting of SEQ ID NOs: 21-67, 210-256 or 304-1099. In some cases, the polynucleic acid polymer may have a sequence with 100% sequence identity to a sequence selected from the sequences listed in listed in Tables 4A, 4B, 5A, 5B, 6A, 6B, 7, 8A, and 8B.

[0308] In embodiments wherein the NIE repressor agent comprises a polynucleic acid polymer, the polynucleic acid polymer may be about 50 nucleotides in length. The polynucleic acid polymer may be about 45 nucleotides in length. The polynucleic acid polymer may be about 40 nucleotides in length. The polynucleic acid polymer may be about 35 nucleotides in length. The polynucleic acid polymer may be about 30 nucleotides in length. The polynucleic acid polymer may be about 24 nucleotides in length. The polynucleic acid polymer may be about 25 nucleotides in length. The polynucleic acid polymer may be about 20 nucleotides in length. The polynucleic acid polymer may be about 19 nucleotides in length. The polynucleic acid polymer may be about 18 nucleotides in length. The polynucleic acid polymer may be about 17 nucleotides in length. The polynucleic acid polymer may be about 16 nucleotides in length. The polynucleic acid polymer may be about 15 nucleotides in length. The polynucleic acid polymer may be about 14 nucleotides in length. The polynucleic acid polymer may be about 13 nucleotides in length. The polynucleic acid polymer may be about 12 nucleotides in length. The polynucleic acid polymer may be about 11 nucleotides in length. The polynucleic acid polymer may be about 10 nucleotides in length. The polynucleic acid polymer may be between about 10 and about 50 nucleotides in length. The polynucleic acid polymer may be between about 10 and about 45 nucleotides in length. The polynucleic acid polymer may be between about 10 and about 40 nucleotides in length. The polynucleic acid polymer may be between about 10 and about 35 nucleotides in length. The polynucleic acid polymer may be between about 10 and about 30 nucleotides in length. The polynucleic acid polymer may be between about 10 and about 25 nucleotides in length. The polynucleic acid polymer may be between about 10 and about 20 nucleotides in length. The polynucleic acid polymer may be between about 15 and about 25 nucleotides in length. The polynucleic acid polymer may be between about 15 and about 30 nucleotides in length. The polynucleic acid polymer may be between about 12 and about 30 nucleotides in length.

[0309] The sequence of the polynucleic acid polymer may be at least 50%, 55%, 60%, 65%, 70%, 75%, 80%, 85%, 90%, 91%, 92%, 93%, 94%, 95%, 96%, 97%, 98%, 99%, or 99.5% complementary to a target sequence of an mRNA transcript, e.g., a partially processed mRNA transcript. The sequence of the polynucleic acid polymer may be 100% complementary to a target sequence of a pre-mRNA transcript.

[0310] As described herein in various examples, exon 20x in human SCN1A gene is equivalent to exon 21x in mouse SCN1A gene.

[0311] Also within the scope of the present disclosure is a method to identify or validate an NMD-inducing exon in the presence of an NMD inhibitor, for example, cycloheximide.

[0312] Where reference is made to a polynucleic acid polymer sequence, the skilled person will understand that one or more substitutions may be tolerated, optionally two substitutions may be tolerated in the sequence, such that it maintains the ability to hybridize to the target sequence; or where the substitution is in a target sequence, the ability to be recognized as the target sequence. References to sequence identity may be determined by BLAST sequence alignment using standard/default parameters. For example, the sequence may have 99% identity and still function according to the present disclosure. In other embodiments, the sequence may have 98% identity and still function according to the present disclosure. In another embodiment, the sequence may have 95% identity and still function according to the present disclosure. In another embodiment, the sequence may have 90% identity and still function according to the present disclosure.

### Pharmaceutical Compositions

[0313] In some embodiments, the compound as described herein (e.g., compound (I) or a salt thereof, or compound (II)) is solubilized or diluted in an artificial cerebral spinal fluid (aCSF) solution. In some embodiments, the compound as described herein (e.g., compound (I) or a salt thereof, or compound (II)) is solubilized or diluted in an isotonic solution.

[0314] The term “artificial cerebrospinal fluid (aCSF),” as used herein, refers to a biological buffer solution that is commonly used as a vehicle solution for administration of agents to the central nervous system (CNS). aCSF, for instance, closely matches the electrolyte concentrations and physiological compatibility of endogenous CSF to enable a vital environment for neuronal tissue by maintaining the homeostasis, osmolarity, and pH at physiological levels.

[0315] The term “isotonic solution,” as used herein, refers to a solution that contains an electrolyte balance similar to plasma in the bloodstream. Administration of an isotonic solution to a subject or patient may increase the fluid volume of the human subject or patient without a fluid shift. Exemplary isotonic solutions include, but are not limited to, 0.9% normal saline, lactated Ringer's solution, Ringer's solution, plasmalyte, and 5% Dextrose in water (D₅W).

[0316] The term “hypotonic solution,” as used herein, refers to a solution that has a lower concentration of electrolytes than plasma. Administration of a hypotonic solution, for example, via an intravenous route, may lead to shifting fluid out of the bloodstream to the area of higher concentration in the interstitial and intracellular spaces. Exemplary hypotonic solutions include, but are not limited to, 0.45% normal saline (half normal saline), 0.33% NaCl solution, 0.225% NaCl solution, and 2.5% Dextrose in water (D_{2.5}W).

[0317] The term “hypertonic solution,” as used herein, refers to a solution that has a higher concentration of electrolytes than plasma. Administration of a hypertonic solution, for example, via an intravenous route, may shift fluid from the interstitial and intracellular spaces into the bloodstream to dilute the electrolytes. Exemplary hypertonic solutions include, but are not limited to, 3% NaCl solution, 5% Dextrose in 0.45% NaCl (D_{5 1/2}NS), 5% Dextrose in 0.9% normal saline (D₅NS), 5% Dextrose in lactated Ringer's solution (D₅LR), 10% Dextrose in water (D₁₀W), 20% Dextrose in water (D₂₀W), and 50% Dextrose in water (D₅₀W).

[0318] In some embodiments, the compound as described herein (e.g., compound (I) or a salt thereof, or compound (II)) is solubilized or diluted in a phosphate-buffered (pH 6.6-7.6) solution. In some embodiments, the compound as described herein (e.g., compound (I) or a salt thereof, or compound (II)) is solubilized or diluted in a phosphate-buffered (pH 6.0-8.0) solution. In some embodiments, the compound as described herein (e.g., compound (I) or a salt thereof, or compound (II)) is solubilized or diluted in a phosphate-buffered (pH 5.0-8.0) solution. In some embodiments, the compound as described herein (e.g., compound (I) or a salt thereof, or compound (II)) is solubilized or diluted in a phosphate-buffered solution with pH 4.5-8.5, pH 4.6-8.5, pH 4.7-8.5, pH 4.8-8.5, pH 4.9-8.5, pH5.0-8.5, pH 5.1-8.5, pH5.2-8.5, pH 5.3-8.5, pH5.4-8.5, pH 5.5-8.5, pH5.6-8.5, pH 5.7-8.5, pH 5.8-8.5, H 5.9-8.5, pH 6.0-8.5, pH 6.1-8.5, pH 6.2-8.5, pH 6.3-8.5, pH 6.4-8.5, pH 6.5-8.5, pH 6.6-8.5, pH 6.7-8.5, pH 6.8-8.5, pH 6.9-8.5, pH 7.0-8.5, pH 7.1-8.5, pH 7.2-8.5, pH 7.3-8.5, pH 7.4-8.5, pH 7.5-8.5, pH 7.6-8.5, pH 7.7-8.5, pH 7.8-8.5, pH 7.9-8.5, pH 8.0-8.5, pH 8.1-8.5, pH 8.2-8.5, pH 8.3-8.5, or pH 8.4-8.5. In some embodiments, the compound as described herein (e.g., compound (I) or a salt thereof, or compound (II)) is solubilized or diluted in a phosphate-buffered solution with pH 4.5-8.3, pH 4.5-8.2, pH 4.5-8.1, pH 4.5-8.0, pH 4.5-7.9, pH 4.5-7.8, pH 4.5-7.7, pH 4.5-7.6, pH 4.5-7.5, pH 4.5-7.4, pH 4.5-7.3, pH 4.5-7.2, pH 4.5-7.1, pH 4.5-7.0, pH 4.5-6.9, pH 4.5-6.8, pH 4.5-6.7, pH 4.5-6.6, pH 4.5-6.5, pH 4.5-6.4, pH 4.5-6.3, pH 4.5-6.2, pH 4.5-6.1, pH 4.5-6.0, pH 4.5-5.9, pH 4.5-5.8, pH 4.5-5.7, pH 4.5-5.6, pH 4.5-5.5, pH 4.5-5.4, pH 4.5-5.3, pH 4.5-5.2, pH 4.5-5.1, pH 4.5-5.0, pH 4.5-4.9, pH 4.5-4.8, pH 4.5-4.7, or pH 4.5-4.6. In some embodiments, the compound as described herein (e.g., compound (I) or a salt thereof, or compound (II)) is solubilized or diluted in a phosphate-buffered solution with pH 6.0-7.6, pH 6.1-7.6, pH 6.2-7.6, pH 6.3-7.6, pH 6.4-7.6, pH 6.5-7.6, pH 6.6-7.6, pH 6.7-7.6, pH 6.8-7.6, pH 6.9-7.6, pH 7.0-7.6, pH 7.1-7.6, pH 7.2-7.6, pH 7.3-7.6, pH 7.4-7.6, or pH 7.5-7.6. In some embodiments, the compound as described herein (e.g., compound (I) or a salt thereof, or compound (II)) is solubilized or diluted in a phosphate-buffered solution with pH 6.6-8.0, pH 6.6-7.9, pH 6.6-7.8, pH 6.6-7.7, pH 6.6-7.6, pH 6.6-7.5, pH 6.6-7.4, pH 6.6-7.3, pH 6.6-7.2, pH 6.6-7.1, pH 6.6-7.0, pH 6.6-6.9, pH 6.6-6.8, or pH 6.6-6.7. In some embodiments, the compound as described herein (e.g., compound (I) or a salt thereof, or compound (II)) is solubilized or diluted in a phosphate-buffered solution with pH 6.0-8.0, pH 6.1-8.0, pH 6.2-8.0, pH 6.3-8.0, pH 6.4-8.0, pH 6.5-8.0, pH 6.6-8.0, pH 6.7-8.0, pH 6.8-8.0, pH 6.9-8.0, pH 7.0-8.0, pH 7.1-8.0, pH 7.2-8.0, pH 7.3-8.0, pH 7.4-8.0, pH 7.5-8.0, pH 7.6-8.0, pH 7.7-8.0, pH 7.8-8.0, or pH 7.9-8.0. In some embodiments, the compound as described herein (e.g., compound (I) or a salt thereof, or compound (II)) is solubilized or diluted in a phosphate-buffered solution with pH 6.0-7.9, pH 6.0-7.8, pH 6.0-7.7, pH 6.0-7.6, pH 6.0-7.5, pH 6.0-7.4, pH 6.0-7.3, pH 6.0-7.2, pH 6.0-7.1, pH 6.0-7.0, pH 6.0-6.9, pH 6.0-6.8, pH 6.0-6.7, pH 6.0-6.6, pH 6.0-6.5, pH 6.0-6.4, pH 6.0-6.3, pH 6.0-6.2, or pH 6.0-6.1. In some embodiments, the compound as described herein (e.g., compound (I) or a salt thereof, or compound (II)) is solubilized or diluted in a phosphate-buffered solution with pH 5.7-8.5, 5.8-8.4, 5.9-8.3, 6.0-8.2, 6.1-8.1, 6.2-8.0, 6.3-7.9, 6.4-7.8, 6.5-7.7, or 6.6-7.6. In some embodiments, the compound as described herein (e.g., compound (I) or a salt thereof, or compound (II)) is solubilized or diluted in a phosphate-buffered solution with pH about 5.0, 5.1, 5.2, 5.3, 5.4, 5.5, 5.6, 5.7, 5.8, 5.9, 6.0. 6.1, 6.2, 6.3, 6.4, 6.5, 6.6, 6.7, 6.8, 6.9, 7.0, 7.1, 7.2, 7.3, 7.4, 7.5, 7.6, 7.7, 7.8, 7.9, or 8.0. In some embodiments, the compound as described herein (e.g., compound (I) or a salt thereof, or compound (II)) is solubilized or diluted in a phosphate-buffered solution with pH 5.0, 5.1, 5.2, 5.3, 5.4, 5.5, 5.6, 5.7, 5.8, 5.9, 6.0. 6.1, 6.2, 6.3, 6.4, 6.5, 6.6, 6.7, 6.8, 6.9, 7.0, 7.1, 7.2, 7.3, 7.4, 7.5, 7.6, 7.7, 7.8, 7.9, or 8.0.

[0319] In some embodiments, the compound as described herein (e.g., compound (I) or a salt thereof, or compound (II)) is solubilized or diluted in a buffer comprising 25-250 mM NaCl.

[0320] In some embodiments, the compound as described herein (e.g., compound (I) or a salt thereof, or compound (II)) is solubilized or diluted in a buffer comprising 25-250, 30-250, 35-250, 40-250, 45-250, 50-250, 55-250, 60-250, 65-250, 70-250, 75-250, 80-250, 85-250, 90-250, 95-250, 100-250, 105-250, 110-250, 115-250, 120-250, 125-250, 130-250, 135-250, 140-250, 145-250, 150-250, 155-250, 160-250, 165-250, 170-250, 175-250, 180-250, 185-250, 190-250, 195-250, 200-250, 205-250, 210-250, 215-250, 220-250, 225-250, 230-250, 235-250, 240-250, or 245-250 mM NaCl. In some embodiments, the compound as described herein (e.g., compound (I) or a salt thereof, or compound (II)) is solubilized or diluted in a buffer comprising 25-245, 25-240, 25-235, 25-230, 25-225, 25-220, 25-215, 25-210, 25-205, 25-200, 25-195, 25-190, 25-185, 25-180, 25-175, 25-170, 25-165, 25-160, 25-155, 25-150, 25-145, 25-140, 25-135, 25-130, 25-125, 25-120, 25-115, 25-110, 25-105, 25-110, 25-105, 25-100, 25-95, 25-90, 25-85, 25-80, 25-75, 25-70, 25-65, 25-60, 25-55, 25-50, 25-45, 25-40, 25-35, or 25-30 mM NaCl. In some embodiments, the compound as described herein (e.g., compound (I) or a salt thereof, or compound (II)) is solubilized or diluted in a buffer comprising 30-245, 35-240, 40-235, 45-230, 50-225, 55-220, 60-215, 65-210, 70-205, 75-200, 80-195, 85-190, 90-185, 95-180, 100-175, 105-170, 110-165, 115-160, 120-155, 125-150, 130-145 or 135-140 mM NaCl. In some embodiments, the compound as described herein (e.g., compound (I) or a salt thereof, or compound (II)) is solubilized or diluted in a buffer comprising 100-140, 101-140, 102-140, 103-140, 104-140, 105-140, 106-140, 107-140, 108-140, 109-140, 110-140, 111-140, 112-140, 113-140, 114-140, 115-140, 116-140, 117-140, 118-140, 119-140, 120-140, 121-140, 122-140, 123-140, 124-140, 125-140, 126-140, 127-140, 128-140, 129-140, 130-140, 131-140, 132-140, 133-140, 134-140, 135-140, 136-140, 137-140, 138-140, or 139-140 mM NaCl. In some embodiments, the compound as described herein (e.g., compound (I) or a salt thereof, or compound (II)) is solubilized or diluted in a buffer comprising 100-139, 100-138, 100-137, 100-136, 100-135, 100-134, 100-133, 100-132, 100-131, 100-130, 100-129, 100-128, 100-127, 100-126, 100-125, 100-124, 100-123, 100-122, 100-121, 100-120, 100-119, 100-118, 100-117, 100-116, 100-115, 100-114, 100-113, 100-112, 100-111, 100-110, 100-109, 100-108, 100-107, 100-106, 100-105, 100-104, 100-103, 100-102, or 100-101 mM NaCl. In some embodiments, the compound as described herein (e.g., compound (I) or a salt thereof, or compound (II)) is solubilized or diluted in a buffer comprising at least 90, 91, 92, 93, 94, 95, 96, 97, 98, 99, 100, 101, 102, 103, 104, 105, 106, 107, 108, 109, 110, 111, 112, 113, 114, 115, 116, 118, 119, 120, 121, 122, 123, 124, 125, 126, 127, 128, 129, 130, 131, 132, 133, 134, 135, 136, 137, 138, 139, or 140 mM NaCl. In some embodiments, the compound as described herein (e.g., compound (I) or a salt thereof, or compound (II)) is solubilized or diluted in a buffer comprising at most 90, 91, 92, 93, 94, 95, 96, 97, 98, 99, 100, 101, 102, 103, 104, 105, 106, 107, 108, 109, 110, 111, 112, 113, 114, 115, 116, 118, 119, 120, 121, 122, 123, 124, 125, 126, 127, 128, 129, 130, 131, 132, 133, 134, 135, 136, 137, 138, 139, or 140 mM NaCl. In some embodiments, the compound as described herein (e.g., compound (I) or a salt thereof, or compound (II)) is solubilized or diluted in a buffer comprising 90, 91, 92, 93, 94, 95, 96, 97, 98, 99, 100, 101, 102, 103, 104, 105, 106, 107, 108, 109, 110, 111, 112, 113, 114, 115, 116, 118, 119, 120, 121, 122, 123, 124, 125, 126, 127, 128, 129, 130, 131, 132, 133, 134, 135, 136, 137, 138, 139, or 140 mM NaCl.

[0321] In some embodiments, the compound as described herein (e.g., compound (I) or a salt thereof, or compound (II)) is solubilized or diluted in a buffer comprising 0.1-20 mM KCl.

[0322] In some embodiments, the compound as described herein (e.g., compound (I) or a salt thereof, or compound (II)) is solubilized or diluted in a buffer comprising 0.1-40, 0.1-39, 0.1-38, 0.1-37, 0.1-36, 0.1-35, 0.1-34, 0.1-33, 0.1-32, 0.1-31, 0.1-30, 0.1-29, 0.1-28, 0.1-27, 0.1-26, 0.1-25, 0.1-24, 0.1-23, 0.1-22, 0.1-21, 0.1-20, 0.1-19, 0.1-18, 0.1-17, 0.1-16, 0.1-15, 0.1-14, 0.1-13, 0.1-12, 0.1-10, 0.1-9, 0.1-8, 0.1-7, 0.1-6, 0.1-5, 0.1-4, 0.1-3, 0.1-2, or 0.1-1 mM KCl. In some embodiments, the compound as described herein (e.g., compound (I) or a salt thereof, or compound (II)) is solubilized or diluted in a buffer comprising 0.2-40, 0.3-40, 0.4-40, 0.5-40, 0.6-40, 0.7-40, 0.8-40, 0.9-40, 1-40, 2-40, 3-40, 4-40, 5-40, 6-40, 7-40, 8-40, 9-40, 10-40, 11-40, 12-40, 13-40, 14-40, 15-40, 16-40, 17-40, 18-40, 19-40, 20-40, 21-40, 22-40, 23-40, 24-40, 25-40, 26-40, 27-40, 28-40, 29-40, 30-40, 31-40, 32-40, 33-40, 34-40, 35-40, 36-40, 37-40, 38-40, or 39-40 mM KCl. In some embodiments, the compound as described herein (e.g., compound (I) or a salt thereof, or compound (II)) is solubilized or diluted in a buffer comprising 0.1-3.5, 0.2-3.5, 0.3-3.5, 0.4-3.5, 0.5-3.5, 0.6-3.5, 0.7-3.5, 0.8-3.5, 0.9-3.5, 1.0-3.5, 1.1-3.5, 1.2-3.5, 1.3-3.5, 1.4-3.5, 1.5-3.5, 1.6-3.5, 1.7-3.5, 1.8-3.5, 1.9-3.5, 2.0-3.5, 2.1-3.5, 2.2-3.5, 2.3-3.5, 2.4-3.5, 2.5-3.5, 2.6-3.5, 2.7-3.5, 2.8-3.5, 2.9-3.5, 3.0-3.5, 3.1-3.5, 3.2-3.5, 3.3-3.5, or 3.4-3.5 mM KCl. In some embodiments, the compound as described herein (e.g., compound (I) or a salt thereof, or compound (II)) is solubilized or diluted in a buffer comprising 0.1-3.4, 0.1-3.3, 0.1-3.2, 0.1-3.1, 0.1-3.0, 0.1-2.9, 0.1-2.8, 0.1-2.7, 0.1-2.6, 0.1-2.5, 0.1-2.4, 0.1-2.3, 0.1-2.2, 0.1-2.1, 0.1-2.0, 0.1-1.9, 0.1-1.8, 0.1-1.7, 0.1-1.6, 0.1-1.5, 0.1-1.4, 0.1-1.3, 0.1-1.2, 0.1-1.1, 0.1-1.0, 0.1-0.9, 0.1-0.8, 0.1-0.7, 0.1-0.6, 0.1-0.5, 0.1-0.4, 0.1-0.3, or 0.1-0.2 mM KCl. In some embodiments, the compound as described herein (e.g., compound (I) or a salt thereof, or compound (II)) is solubilized or diluted in a buffer comprising at least 0.1, 0.2, 0.3, 0.4, 0.5, 0.6, 0.7, 0.8, 0.9, 1.0, 1.1, 1.2, 1.3, 1.4, 1.5, 1.6, 1.7, 1.8, 1.9, 2.0, 2.1, 2.2, 2.3, 2.4, 2.5, 2.6, 2.7, 2.8, 2.9, 3.0, 3.1, 3.2, 3.3, 3.4, or 3.5 mM KCl. In some embodiments, the compound as described herein (e.g., compound (I) or a salt thereof, or compound (II)) is solubilized or diluted in a buffer comprising at most 0.1, 0.2, 0.3, 0.4, 0.5, 0.6, 0.7, 0.8, 0.9, 1.0, 1.1, 1.2, 1.3, 1.4, 1.5, 1.6, 1.7, 1.8, 1.9, 2.0, 2.1, 2.2, 2.3, 2.4, 2.5, 2.6, 2.7, 2.8, 2.9, 3.0, 3.1, 3.2, 3.3, 3.4, or 3.5 mM KCl. In some embodiments, the compound as described herein (e.g., compound (I) or a salt thereof, or compound (II)) is solubilized or diluted in a buffer comprising 0.1, 0.2, 0.3, 0.4, 0.5, 0.6, 0.7, 0.8, 0.9, 1.0, 1.1, 1.2, 1.3, 1.4, 1.5, 1.6, 1.7, 1.8, 1.9, 2.0, 2.1, 2.2, 2.3, 2.4, 2.5, 2.6, 2.7, 2.8, 2.9, 3.0, 3.1, 3.2, 3.3, 3.4, or 3.5 mM KCl.

[0323] In some embodiments, the compound as described herein (e.g., compound (I) or a salt thereof, or compound (II)) is solubilized or diluted in a buffer comprising 0.1-50 mM Na₂HPO₄.

[0324] In some embodiments, the compound as described herein (e.g., compound (I) or a salt thereof, or compound (II)) is solubilized or diluted in a buffer comprising 0.01-100, 0.02-100, 0.03-100, 0.04-100, 0.05-100, 0.06-100, 0.07-100, 0.08-100, 0.09-100, 0.1-100, 0.2-100, 0.3-100, 0.4-100, 0.5-100, 0.6-100, 0.7-100, 0.8-100, 0.9-100, 1-100, 2-100, 3-100, 4-100, 5-100, 6-100, 7-100, 8-100, 9-100, 10-100, 15-100, 20-100, 25-100, 30-100, 35-100, 40-100, 45-100, 50-100, 55-100, 60-100, 65-100, 70-100, 75-100, 80-100, 85-100, 90-100, or 95-100 mM Na₂HPO₄. In some embodiments, the compound as described herein (e.g., compound (I) or a salt thereof, or compound (II)) is solubilized or diluted in a buffer comprising 0.01-95, 0.01-90, 0.01-85, 0.01-80, 0.01-75, 0.01-70, 0.01-65, 0.01-60, 0.01-55, 0.01-50, 0.01-45, 0.01-40, 0.01-35, 0.01-30, 0.01-25, 0.01-20, 0.01-15, 0.01-10, 0.01-9, 0.01-8, 0.01-7, 0.01-6, 0.01-5, 0.01-4, 0.01-3, 0.01-2, 0.01-1, 0.01-0.9, 0.01-0.8, 0.01-0.7, 0.01-0.6, 0.01-0.5, 0.01-0.4, 0.01-0.3, 0.01-0.2, 0.01-0.1, 0.01-0.09, 0.01-0.08, 0.01-0.07, 0.01-0.06, 0.01-0.05, 0.01-0.04, 0.01-0.03, or 0.01-0.02 mM Na₂HPO₄. In some embodiments, the compound as described herein (e.g., compound (I) or a salt thereof, or compound (II)) is solubilized or diluted in a buffer comprising 0.1-3.0, 0.1-2.9, 0.1-2.8, 0.1-2.7, 0.1-2.6, 0.1-2.5, 0.1-2.4, 0.1-2.3, 0.1-2.2, 0.1-2.1, 0.1-2.0, 0.1-1.9, 0.1-1.8, 0.1-1.7, 0.1-1.6, 0.1-1.5, 0.1-1.4, 0.1-1.3, 0.1-1.2, 0.1-1.1, 0.1-1.0, 0.1-0.9, 0.1-0.8, 0.1-0.7, 0.1-0.6, 0.1-0.5, 0.1-0.4, 0.1-0.3, or 0.1-0.2 mM Na₂HPO₄. In some embodiments, the compound as described herein (e.g., compound (I) or a salt thereof, or compound (II)) is solubilized or diluted in a buffer comprising 0.1-3.0, 0.2-3.0, 0.3-3.0, 0.4-3.0, 0.5-3.0, 0.6-3.0, 0.7-3.0, 0.8-3.0, 0.9-3.0, 1.0-3.0, 1.2-3.0, 1.3-3.0, 1.4-3.0, 1.5-3.0, 1.6-3.0, 1.7-3.0, 1.8-3.0, 1.9-3.0, 2.0-3.0, 2.1-3.0, 2.2-3.0, 2.3-3.0, 2.4-3.0, 2.5-3.0, 2.6-3.0, 2.7-3.0, 2.8-3.0, or 2.9-3.0 mM Na₂HPO₄. In some embodiments, the compound as described herein (e.g., compound (I) or a salt thereof, or compound (II)) is solubilized or diluted in a buffer comprising at least 0.1, 0.2, 0.3, 0.4, 0.5, 0.6, 0.7, 0.8, 0.9, 1.0, 1.1, 1.2, 1.3, 1.4, 1.5, 1.6, 1.7, 1.8, 1.9, 2.0, 2.1, 2.2, 2.3, 2.4, 2.5, 2.6, 2.7, 2.8, 2.9, or 3.0 mM Na₂HPO₄. In some embodiments, the compound as described herein (e.g., compound (I) or a salt thereof, or compound (II)) is solubilized or diluted in a buffer comprising at most 0.1, 0.2, 0.3, 0.4, 0.5, 0.6, 0.7, 0.8, 0.9, 1.0, 1.1, 1.2, 1.3, 1.4, 1.5, 1.6, 1.7, 1.8, 1.9, 2.0, 2.1, 2.2, 2.3, 2.4, 2.5, 2.6, 2.7, 2.8, 2.9, or 3.0 mM Na₂HPO₄. In some embodiments, the compound as described herein (e.g., compound (I) or a salt thereof, or compound (II)) is solubilized or diluted in a buffer comprising 0.1, 0.2, 0.3, 0.4, 0.5, 0.6, 0.7, 0.8, 0.9, 1.0, 1.1, 1.2, 1.3, 1.4, 1.5, 1.6, 1.7, 1.8, 1.9, 2.0, 2.1, 2.2, 2.3, 2.4, 2.5, 2.6, 2.7, 2.8, 2.9, or 3.0 mM Na₂HPO₄.

[0325] In some embodiments, the compound as described herein (e.g., compound (I) or a salt thereof, or compound (II)) is solubilized or diluted in a buffer comprising 0.1-50 mM NaH₂PO₄.

[0326] In some embodiments, the compound as described herein (e.g., compound (I) or a salt thereof, or compound (II)) is solubilized or diluted in a buffer comprising 0.01-100, 0.02-100, 0.03-100, 0.04-100, 0.05-100, 0.06-100, 0.07-100, 0.08-100, 0.09-100, 0.1-100, 0.2-100, 0.3-100, 0.4-100, 0.5-100, 0.6-100, 0.7-100, 0.8-100, 0.9-100, 1-100, 2-100, 3-100, 4-100, 5-100, 6-100, 7-100, 8-100, 9-100, 10-100, 15-100, 20-100, 25-100, 30-100, 35-100, 40-100, 45-100, 50-100, 55-100, 60-100, 65-100, 70-100, 75-100, 80-100, 85-100, 90-100, or 95-100 mM NaH₂PO₄. In some embodiments, the compound as described herein (e.g., compound (I) or a salt thereof, or compound (II)) is solubilized or diluted in a buffer comprising 0.01-95, 0.01-90, 0.01-85, 0.01-80, 0.01-75, 0.01-70, 0.01-65, 0.01-60, 0.01-55, 0.01-50, 0.01-45, 0.01-40, 0.01-35, 0.01-30, 0.01-25, 0.01-20, 0.01-15, 0.01-10, 0.01-9, 0.01-8, 0.01-7, 0.01-6, 0.01-5, 0.01-4, 0.01-3, 0.01-2, 0.01-1, 0.01-0.9, 0.01-0.8, 0.01-0.7, 0.01-0.6, 0.01-0.5, 0.01-0.4, 0.01-0.3, 0.01-0.2, 0.01-0.1, 0.01-0.09, 0.01-0.08, 0.01-0.07, 0.01-0.06, 0.01-0.05, 0.01-0.04, 0.01-0.03, or 0.01-0.02 mM NaH₂PO₄. In some embodiments, the compound as described herein (e.g., compound (I) or a salt thereof, or compound (II)) is solubilized or diluted in a buffer comprising 0.1-3.0, 0.1-2.9, 0.1-2.8, 0.1-2.7, 0.1-2.6, 0.1-2.5, 0.1-2.4, 0.1-2.3, 0.1-2.2, 0.1-2.1, 0.1-2.0, 0.1-1.9, 0.1-1.8, 0.1-1.7, 0.1-1.6, 0.1-1.5, 0.1-1.4, 0.1-1.3, 0.1-1.2, 0.1-1.1, 0.1-1.0, 0.1-0.9, 0.1-0.8, 0.1-0.7, 0.1-0.6, 0.1-0.5, 0.1-0.4, 0.1-0.3, or 0.1-0.2 mM NaH₂PO₄. In some embodiments, the compound as described herein (e.g., compound (I) or a salt thereof, or compound (II)) is solubilized or diluted in a buffer comprising 0.1-3.0, 0.2-3.0, 0.3-3.0, 0.4-3.0, 0.5-3.0, 0.6-3.0, 0.7-3.0, 0.8-3.0, 0.9-3.0, 1.0-3.0, 1.2-3.0, 1.3-3.0, 1.4-3.0, 1.5-3.0, 1.6-3.0, 1.7-3.0, 1.8-3.0, 1.9-3.0, 2.0-3.0, 2.1-3.0, 2.2-3.0, 2.3-3.0, 2.4-3.0, 2.5-3.0, 2.6-3.0, 2.7-3.0, 2.8-3.0, or 2.9-3.0 mM NaH₂PO₄. In some embodiments, the compound as described herein (e.g., compound (I) or a salt thereof, or compound (II)) is solubilized or diluted in a buffer comprising at least 0.1, 0.2, 0.3, 0.4, 0.5, 0.6, 0.7, 0.8, 0.9, 1.0, 1.1, 1.2, 1.3, 1.4, 1.5, 1.6, 1.7, 1.8, 1.9, 2.0, 2.1, 2.2, 2.3, 2.4, 2.5, 2.6, 2.7, 2.8, 2.9, or 3.0 mM NaH₂PO₄. In some embodiments, the compound as described herein (e.g., compound (I) or a salt thereof, or compound (II)) is solubilized or diluted in a buffer comprising at most 0.1, 0.2, 0.3, 0.4, 0.5, 0.6, 0.7, 0.8, 0.9, 1.0, 1.1, 1.2, 1.3, 1.4, 1.5, 1.6, 1.7, 1.8, 1.9, 2.0, 2.1, 2.2, 2.3, 2.4, 2.5, 2.6, 2.7, 2.8, 2.9, or 3.0 mM NaH₂PO₄. In some embodiments, the compound as described herein (e.g., compound (I) or a salt thereof, or compound (II)) is solubilized or diluted in a buffer comprising 0.1, 0.2, 0.3, 0.4, 0.5, 0.6, 0.7, 0.8, 0.9, 1.0, 1.1, 1.2, 1.3, 1.4, 1.5, 1.6, 1.7, 1.8, 1.9, 2.0, 2.1, 2.2, 2.3, 2.4, 2.5, 2.6, 2.7, 2.8, 2.9, or 3.0 mM NaH₂PO₄.

[0327] In some embodiments, the compound as described herein (e.g., compound (I) or a salt thereof, or compound (II)) is solubilized or diluted in a buffer comprising 0.1-50 mM CaCl₂.

[0328] In some embodiments, the compound as described herein (e.g., compound (I) or a salt thereof, or compound (II)) is solubilized or diluted in a buffer comprising 0.1-50, 0.2-50, 0.3-50, 0.4-50, 0.5-50, 0.6-50, 0.7-50, 0.8-50, 0.9-50, 1.0-50, −50, 1.1-50, 1.2-50, 1.3-50, 1.4-50, 1.5-50, 1.6-50, 1.7-50, 1.8-50, 1.9-50, 2.0-50, 2.1-50, 2.2-50, 2.3-50, 2.4-50, 2.5-50, 2.6-50, 2.7-50, 2.8-50, 2.9-50, 3.0-50, 3.1-50, 3.2-50, 3.3-50, 3.4-50, 3.5-50, 3.6-50, 3.7-50, 3.8-50, 3.9-50, 4-50, 5-50, 6-50, 7-50, 8-50, 9-50, 10-50, 15-50, 20-50, 25-50, 1 30-50, 35-50, 40-50, or 45-50 mM CaCl₂. In some embodiments, the compound as described herein (e.g., compound (I) or a salt thereof, or compound (II)) is solubilized or diluted in a buffer comprising 0.1-45, 0.1-40, 0.1-35, 0.1-30, 0.1-25, 0.1-20, 0.1-15, 0.1-10, 0.1-5, 0.1-4, 0.1-4.9, 0.1-4.8, 0.1-4.7, 0.1-4.6, 0.1-4.5, 0.1-4.4, 0.1-4.3, 0.1-4.2, 0.1-4.1, 0.1-4.0, 0.1-3.9, 0.1-3.8, 0.1-3.7, 0.1-3.6, 0.1-3.5, 0.1-3.4, 0.1-3.3, 0.1-3.2, 0.1-3.1, 0.1-3.0, 0.1-2.9, 0.1-2.8, 0.1-2.7, 0.1-2.6, 0.1-2.5, 0.1-2.4, 0.1-2.3, 0.1-2.2, 0.1-2.1, 0.1-2.0, 0.1-1.9, 0.1-1.8, 0.1-1.7, 0.1-1.6, 0.1-1.5, 0.1-1.4, 0.1-1.3, 0.1-1.2, 0.1-1.1, 0.1-1.0, 0.1-0.9, 0.1-0.8, 0.1-0.7, 0.1-0.6, 0.1-0.5, 0.1-0.4, 0.1-0.3, or 0.1-0.2 mM CaCl₂. In some embodiments, the compound as described herein (e.g., compound (I) or a salt thereof, or compound (II)) is solubilized or diluted in a buffer comprising at least 1.0, 1.1, 1.2, 1.3, 1.4, 1.5, 1.6, 1.7, 1.8, 1.9, 2.0, 2.1, 2.2, 2.3, 2.4, 2.5, 2.6, 2.7, 2.8, 2.9, 3.0, 3.1, 3.2, 3.3, 3.4, 3.5, 3.6, 3.7, 3.8, 3.9, or 4.0 mM CaCl₂. In some embodiments, the compound as described herein (e.g., compound (I) or a salt thereof, or compound (II)) is solubilized or diluted in a buffer comprising at most 1.0, 1.1, 1.2, 1.3, 1.4, 1.5, 1.6, 1.7, 1.8, 1.9, 2.0, 2.1, 2.2, 2.3, 2.4, 2.5, 2.6, 2.7, 2.8, 2.9, 3.0, 3.1, 3.2, 3.3, 3.4, 3.5, 3.6, 3.7, 3.8, 3.9, or 4.0 mM CaCl₂. In some embodiments, the compound as described herein (e.g., compound (I) or a salt thereof, or compound (II)) is solubilized or diluted in a buffer comprising 1.0, 1.1, 1.2, 1.3, 1.4, 1.5, 1.6, 1.7, 1.8, 1.9, 2.0, 2.1, 2.2, 2.3, 2.4, 2.5, 2.6, 2.7, 2.8, 2.9, 3.0, 3.1, 3.2, 3.3, 3.4, 3.5, 3.6, 3.7, 3.8, 3.9, or 4.0 mM CaCl₂.

[0329] In some embodiments, the compound as described herein (e.g., compound (I) or a salt thereof, or compound (II)) is solubilized or diluted in a buffer comprising 0.1-50 mM MgCl₂.

[0330] In some embodiments, the compound as described herein (e.g., compound (I) or a salt thereof, or compound (II)) is solubilized or diluted in a buffer comprising 0.1-50, 0.2-50, 0.3-50, 0.4-50, 0.5-50, 0.6-50, 0.7-50, 0.8-50, 0.9-50, 1.0-50, −50, 1.1-50, 1.2-50, 1.3-50, 1.4-50, 1.5-50, 1.6-50, 1.7-50, 1.8-50, 1.9-50, 2.0-50, 2.1-50, 2.2-50, 2.3-50, 2.4-50, 2.5-50, 2.6-50, 2.7-50, 2.8-50, 2.9-50, 3.0-50, 3.1-50, 3.2-50, 3.3-50, 3.4-50, 3.5-50, 3.6-50, 3.7-50, 3.8-50, 3.9-50, 4-50, 5-50, 6-50, 7-50, 8-50, 9-50, 10-50, 15-50, 20-50, 25-50, 1 30-50, 35-50, 40-50, or 45-50 mM MgCl₂. In some embodiments, the compound as described herein (e.g., compound (I) or a salt thereof, or compound (II)) is solubilized or diluted in a buffer comprising 0.1-45, 0.1-40, 0.1-35, 0.1-30, 0.1-25, 0.1-20, 0.1-15, 0.1-10, 0.1-5, 0.1-4, 0.1-4.9, 0.1-4.8, 0.1-4.7, 0.1-4.6, 0.1-4.5, 0.1-4.4, 0.1-4.3, 0.1-4.2, 0.1-4.1, 0.1-4.0, 0.1-3.9, 0.1-3.8, 0.1-3.7, 0.1-3.6, 0.1-3.5, 0.1-3.4, 0.1-3.3, 0.1-3.2, 0.1-3.1, 0.1-3.0, 0.1-2.9, 0.1-2.8, 0.1-2.7, 0.1-2.6, 0.1-2.5, 0.1-2.4, 0.1-2.3, 0.1-2.2, 0.1-2.1, 0.1-2.0, 0.1-1.9, 0.1-1.8, 0.1-1.7, 0.1-1.6, 0.1-1.5, 0.1-1.4, 0.1-1.3, 0.1-1.2, 0.1-1.1, 0.1-1.0, 0.1-0.9, 0.1-0.8, 0.1-0.7, 0.1-0.6, 0.1-0.5, 0.1-0.4, 0.1-0.3, or 0.1-0.2 mM MgCl₂. In some embodiments, the compound as described herein (e.g., compound (I) or a salt thereof, or compound (II)) is solubilized or diluted in a buffer comprising at least 0.1, 0.2, 0.3, 0.4, 0.5, 0.6, 0.7, 0.8, 0.9, 1.0, 1.1, 1.2, 1.3, 1.4, 1.5, 1.6, 1.7, 1.8, 1.9, 2.0, 2.1, 2.2, 2.3, 2.4, 2.5, 2.6, 2.7, 2.8, 2.9, 3.0, 3.1, 3.2, 3.3, 3.4, 3.5, 3.6, 3.7, 3.8, 3.9, or 4.0 mM MgCl₂. In some embodiments, the compound as described herein (e.g., compound (I) or a salt thereof, or compound (II)) is solubilized or diluted in a buffer comprising at most 0.1, 0.2, 0.3, 0.4, 0.5, 0.6, 0.7, 0.8, 0.9, 1.0, 1.1, 1.2, 1.3, 1.4, 1.5, 1.6, 1.7, 1.8, 1.9, 2.0, 2.1, 2.2, 2.3, 2.4, 2.5, 2.6, 2.7, 2.8, 2.9, 3.0, 3.1, 3.2, 3.3, 3.4, 3.5, 3.6, 3.7, 3.8, 3.9, or 4.0 mM MgCl₂. In some embodiments, the compound as described herein (e.g., compound (I) or a salt thereof, or compound (II)) is solubilized or diluted in a buffer comprising 0.1, 0.2, 0.3, 0.4, 0.5, 0.6, 0.7, 0.8, 0.9, 1.0, 1.1, 1.2, 1.3, 1.4, 1.5, 1.6, 1.7, 1.8, 1.9, 2.0, 2.1, 2.2, 2.3, 2.4, 2.5, 2.6, 2.7, 2.8, 2.9, 3.0, 3.1, 3.2, 3.3, 3.4, 3.5, 3.6, 3.7, 3.8, 3.9, or 4.0 mM MgCl₂.

[0331] In some embodiments, the compound as described herein (e.g., compound (I) or a salt thereof, or compound (II)) is solubilized or diluted in a buffer further comprising 1-100 mM NaHCO₃, 1-100 mM KHCO₃, or a combination thereof.

[0332] In some embodiments, the compound as described herein (e.g., compound (I) or a salt thereof, or compound (II)) is solubilized or diluted in a buffer comprising 1-100 mM NaHCO₃.

[0333] In some embodiments, the compound as described herein (e.g., compound (I) or a salt thereof, or compound (II)) is solubilized or diluted in a buffer comprising 1-99, 1-95, 1-90, 1-85, 1-80, 1-75, 1-70, 1-65, 1-60, 1-55, 1-50, 1-45, 1-40, 1-35, 1-30, 1-25, 1-20, 1-15, 1-10, 1-9, 1-8, 1-7, 1-6, 1-5, 1-4, 1-3, or 1-2 mM NaHCO₃. In some embodiments, the compound as described herein (e.g., compound (I) or a salt thereof, or compound (II)) is solubilized or diluted in a buffer comprising 2-100, 3-100, 4-100, 5-100, 6-100, 7-100, 8-100, 9-100, 10-100, 15-100, 20-100, 25-100, 30-100, 35-100, 40-100, 45-100, 50-100, 55-100, 60-100, 65-100, 70-100, 75-100, 80-100, 85-100, 90-100, or 95-100 mM NaHCO₃. In some embodiments, the compound as described herein (e.g., compound (I) or a salt thereof, or compound (II)) is solubilized or diluted in a buffer comprising 24.0-28.0, 24.0-27.9, 24.0-27.8, 24.0-27.7, 24.0-27.6, 24.0-27.5, 24.0-27.4, 24.0-27.3, 24.0-27.2, 24.0-27.1, 24.0-27.0, 24.0-26.9, 24.0-26.8, 24.0-26.7, 24.0-26.6, 24.0-26.5, 24.0-26.4, 24.0-26.3, 24.0-26.2, 24.0-26.1, 24.0-26.0, 24.0-25.9, 4.0-25.8, 24.0-25.7, 24.0-25.6, 24.0-25.5, 24.0-25.4, 24.0-25.3, 24.0-25.2, 24.0-25.1, 24.0-25.0, 24.0-24.9, 24.0-24.8, 24.0-24.7, 24.0-24.6, 24.0-24.5, 24.0-24.4, 24.0-24.3, 24.0-24.2, or 24.0-24.1 mM NaHCO₃. In some embodiments, the compound as described herein (e.g., compound (I) or a salt thereof, or compound (II)) is solubilized or diluted in a buffer comprising 24.1-28.0, 24.2-28.0, 24.3-28.0, 24.4-28.0, 24.5-28.0, 24.6-28.0, 24.7-28.0, 24.8-28.0, 24.9-28.0, 25.0-28.0, 25.1-28.0, 25.2-28.0, 25.3-28.0, 25.4-28.0, 25.5-28.0, 25.6-28.0, 25.7-28.0, 25.8-28.0, 25.9-28.0, 26.0-28.0, 26.1-28.0, 26.2-28.0, 26.3-28.0, 26.4-28.0, 26.5-28.0, 26.6-28.0, 26.7-28.0, 26.8-28.0, 26.9-28.0, 27.0-28.0, 27.1-28.0, 27.2-28.0, 27.3-28.0, 27.4-28.0, 27.5-28.0, 27.6-28.0, 27.7-28.0, 27.8-28.0, or 27.9-28.0 mM NaHCO₃. In some embodiments, the compound as described herein (e.g., compound (I) or a salt thereof, or compound (II)) is solubilized or diluted in a buffer comprising at least 24.0, 24.1, 24.2, 24.3, 24.4, 24.5, 24.6, 24.7, 24.8, 24.9, 25.0, 25.1, 25.2, 25.3, 25.4, 25.5, 25.6, 25.7, 25.8, 25.9, 26.0, 26.1, 26.2, 26.3, 26.4, 26.5, 26.6, 26.7, 26.8, 26.9, 27.0, 27.1, 27.2, 27.3, 27.4, 27.5, 27.6, 27.7, 27.8, 27.9, or 28.0 mM NaHCO₃. In some embodiments, the compound as described herein (e.g., compound (I) or a salt thereof, or compound (II)) is solubilized or diluted in a buffer comprising at most 24.0, 24.1, 24.2, 24.3, 24.4, 24.5, 24.6, 24.7, 24.8, 24.9, 25.0, 25.1, 25.2, 25.3, 25.4, 25.5, 25.6, 25.7, 25.8, 25.9, 26.1, 26.2, 26.3, 26.4, 26.5, 26.6, 26.7, 26.8, 26.9, 27.0, 27.1, 27.2, 27.3, 27.4, 27.5, 27.6, 27.7, 27.8, 27.9, or 28.0 mM NaHCO₃. In some embodiments, the compound as described herein (e.g., compound (I) or a salt thereof, or compound (II)) is solubilized or diluted in a buffer comprising 24.0, 24.1, 24.2, 24.3, 24.4, 24.5, 24.6, 24.7, 24.8, 24.9, 25.0, 25.1, 25.2, 25.3, 25.4, 25.5, 25.6, 25.7, 25.8, 25.9, 26.1, 26.2, 26.3, 26.4, 26.5, 26.6, 26.7, 26.8, 26.9, 27.0, 27.1, 27.2, 27.3, 27.4, 27.5, 27.6, 27.7, 27.8, 27.9, or 28.0 mM NaHCO₃.

[0334] In some embodiments, the compound as described herein (e.g., compound (I) or a salt thereof, or compound (II)) is solubilized or diluted in a buffer comprising 1-100 mM KHCO₃.

[0335] In some embodiments, the compound as described herein (e.g., compound (I) or a salt thereof, or compound (II)) is solubilized or diluted in a buffer comprising 1-99, 1-95, 1-90, 1-85, 1-80, 1-75, 1-70, 1-65, 1-60, 1-55, 1-50, 1-45, 1-40, 1-35, 1-30, 1-25, 1-20, 1-15, 1-10, 1-9, 1-8, 1-7, 1-6, 1-5, 1-4, 1-3, or 1-2 mM KHCO₃. In some embodiments, the compound as described herein (e.g., compound (I) or a salt thereof, or compound (II)) is solubilized or diluted in a buffer comprising 2-100, 3-100, 4-100, 5-100, 6-100, 7-100, 8-100, 9-100, 10-100, 15-100, 20-100, 25-100, 30-100, 35-100, 40-100, 45-100, 50-100, 55-100, 60-100, 65-100, 70-100, 75-100, 80-100, 85-100, 90-100, or 95-100 mM KHCO₃. In some embodiments, the compound as described herein (e.g., compound (I) or a salt thereof, or compound (II)) is solubilized or diluted in a buffer comprising 24.0-28.0, 24.0-27.9, 24.0-27.8, 24.0-27.7, 24.0-27.6, 24.0-27.5, 24.0-27.4, 24.0-27.3, 24.0-27.2, 24.0-27.1, 24.0-27.0, 24.0-26.9, 24.0-26.8, 24.0-26.7, 24.0-26.6, 24.0-26.5, 24.0-26.4, 24.0-26.3, 24.0-26.2, 24.0-26.1, 24.0-26.0, 24.0-25.9, 4.0-25.8, 24.0-25.7, 24.0-25.6, 24.0-25.5, 24.0-25.4, 24.0-25.3, 24.0-25.2, 24.0-25.1, 24.0-25.0, 24.0-24.9, 24.0-24.8, 24.0-24.7, 24.0-24.6, 24.0-24.5, 24.0-24.4, 24.0-24.3, 24.0-24.2, or 24.0-24.1 mM KHCO₃. In some embodiments, the compound as described herein (e.g., compound (I) or a salt thereof, or compound (II)) is solubilized or diluted in a buffer comprising 24.1-28.0, 24.2-28.0, 24.3-28.0, 24.4-28.0, 24.5-28.0, 24.6-28.0, 24.7-28.0, 24.8-28.0, 24.9-28.0, 25.0-28.0, 25.1-28.0, 25.2-28.0, 25.3-28.0, 25.4-28.0, 25.5-28.0, 25.6-28.0, 25.7-28.0, 25.8-28.0, 25.9-28.0, 26.0-28.0, 26.1-28.0, 26.2-28.0, 26.3-28.0, 26.4-28.0, 26.5-28.0, 26.6-28.0, 26.7-28.0, 26.8-28.0, 26.9-28.0, 27.0-28.0, 27.1-28.0, 27.2-28.0, 27.3-28.0, 27.4-28.0, 27.5-28.0, 27.6-28.0, 27.7-28.0, 27.8-28.0, or 27.9-28.0 mM KHCO₃. In some embodiments, the compound as described herein (e.g., compound (I) or a salt thereof, or compound (II)) is solubilized or diluted in a buffer comprising at least 24.0, 24.1, 24.2, 24.3, 24.4, 24.5, 24.6, 24.7, 24.8, 24.9, 25.0, 25.1, 25.2, 25.3, 25.4, 25.5, 25.6, 25.7, 25.8, 25.9, 26.0, 26.1, 26.2, 26.3, 26.4, 26.5, 26.6, 26.7, 26.8, 26.9, 27.0, 27.1, 27.2, 27.3, 27.4, 27.5, 27.6, 27.7, 27.8, 27.9, or 28.0 mM KHCO₃. In some embodiments, the compound as described herein (e.g., compound (I) or a salt thereof, or compound (II)) is solubilized or diluted in a buffer comprising at most 24.0, 24.1, 24.2, 24.3, 24.4, 24.5, 24.6, 24.7, 24.8, 24.9, 25.0, 25.1, 25.2, 25.3, 25.4, 25.5, 25.6, 25.7, 25.8, 25.9, 26.1, 26.2, 26.3, 26.4, 26.5, 26.6, 26.7, 26.8, 26.9, 27.0, 27.1, 27.2, 27.3, 27.4, 27.5, 27.6, 27.7, 27.8, 27.9, or 28.0 mM KHCO₃. In some embodiments, the compound as described herein (e.g., compound (I) or a salt thereof, or compound (II)) is solubilized or diluted in a buffer comprising 24.0, 24.1, 24.2, 24.3, 24.4, 24.5, 24.6, 24.7, 24.8, 24.9, 25.0, 25.1, 25.2, 25.3, 25.4, 25.5, 25.6, 25.7, 25.8, 25.9, 26.1, 26.2, 26.3, 26.4, 26.5, 26.6, 26.7, 26.8, 26.9, 27.0, 27.1, 27.2, 27.3, 27.4, 27.5, 27.6, 27.7, 27.8, 27.9, or 28.0 mM KHCO₃.

[0336] In some embodiments, the compound as described herein (e.g., compound (I) or a salt thereof, or compound (II)) is solubilized or diluted in a buffer comprising 0-50 mM KH₂PO₄.

[0337] In some embodiments, the compound as described herein (e.g., compound (I) or a salt thereof, or compound (II)) is solubilized or diluted in a buffer comprising 0-100, 0.01-100, 0.02-100, 0.03-100, 0.04-100, 0.05-100, 0.06-100, 0.07-100, 0.08-100, 0.09-100, 0.1-100, 0.2-100, 0.3-100, 0.4-100, 0.5-100, 0.6-100, 0.7-100, 0.8-100, 0.9-100, 1-100, 2-100, 3-100, 4-100, 5-100, 6-100, 7-100, 8-100, 9-100, 10-100, 15-100, 20-100, 25-100, 30-100, 35-100, 40-100, 45-100, 50-100, 55-100, 60-100, 65-100, 70-100, 75-100, 80-100, 85-100, 90-100, or 95-100 mM KH₂PO₄. In some embodiments, the compound as described herein (e.g., compound (I) or a salt thereof, or compound (II)) is solubilized or diluted in a buffer comprising 0-95, 0-90, 0-85, 0-80, 0-75, 0-70, 0-65, 0-60, 0-55, 0-50, 0-45, 0-40, 0-35, 0-30, 0-25, 0-20, 0-15, 0-10, 0-9, 0-8, 0-7, 0-6, 0-5, 0-4, 0-3, 0-2, 0-1, 0-0.9, 0-0.8, 0-0.7, 0-0.6, 0-0.5, 0-0.4, 0-0.3, 0-0.2, 0-0.1, 0-0.09, 0-0.08, 0-0.07, 0-0.06, 0-0.05, 0-0.04, 0-0.03, or 0-0.02 mM KH₂PO₄. In some embodiments, the compound as described herein (e.g., compound (I) or a salt thereof, or compound (II)) is solubilized or diluted in a buffer comprising 0.01-95, 0.01-90, 0.01-85, 0.01-80, 0.01-75, 0.01-70, 0.01-65, 0.01-60, 0.01-55, 0.01-50, 0.01-45, 0.01-40, 0.01-35, 0.01-30, 0.01-25, 0.01-20, 0.01-15, 0.01-10, 0.01-9, 0.01-8, 0.01-7, 0.01-6, 0.01-5, 0.01-4, 0.01-3, 0.01-2, 0.01-1, 0.01-0.9, 0.01-0.8, 0.01-0.7, 0.01-0.6, 0.01-0.5, 0.01-0.4, 0.01-0.3, 0.01-0.2, 0.01-0.1, 0.01-0.09, 0.01-0.08, 0.01-0.07, 0.01-0.06, 0.01-0.05, 0.01-0.04, 0.01-0.03, or 0.01-0.02 mM KH₂PO₄. In some embodiments, the compound as described herein (e.g., compound (I) or a salt thereof, or compound (II)) is solubilized or diluted in a buffer comprising 0-3.0, 0-2.9, 0-2.8, 0-2.7, 0-2.6, 0-2.5, 0-2.4, 0-2.3, 0-2.2, 0-2.1, 0-2.0, 0-1.9, 0-1.8, 0-1.7, 0-1.6, 0-1.5, 0-1.4, 0-1.3, 0-1.2, 0-1.1, 0-1.0, 0-0.9, 0-0.8, 0-0.7, 0-0.6, 0-0.5, 0-0.4, 0-0.3, or 0-0.2 mM KH₂PO₄. In some embodiments, the compound as described herein (e.g., compound (I) or a salt thereof, or compound (II)) is solubilized or diluted in a buffer comprising 0.1-3.0, 0.1-2.9, 0.1-2.8, 0.1-2.7, 0.1-2.6, 0.1-2.5, 0.1-2.4, 0.1-2.3, 0.1-2.2, 0.1-2.1, 0.1-2.0, 0.1-1.9, 0.1-1.8, 0.1-1.7, 0.1-1.6, 0.1-1.5, 0.1-1.4, 0.1-1.3, 0.1-1.2, 0.1-1.1, 0.1-1.0, 0.1-0.9, 0.1-0.8, 0.1-0.7, 0.1-0.6, 0.1-0.5, 0.1-0.4, 0.1-0.3, or 0.1-0.2 mM KH₂PO₄. In some embodiments, the compound as described herein (e.g., compound (I) or a salt thereof, or compound (II)) is solubilized or diluted in a buffer comprising 0-3.0, 0.1-3.0, 0.2-3.0, 0.3-3.0, 0.4-3.0, 0.5-3.0, 0.6-3.0, 0.7-3.0, 0.8-3.0, 0.9-3.0, 1.0-3.0, 1.2-3.0, 1.3-3.0, 1.4-3.0, 1.5-3.0, 1.6-3.0, 1.7-3.0, 1.8-3.0, 1.9-3.0, 2.0-3.0, 2.1-3.0, 2.2-3.0, 2.3-3.0, 2.4-3.0, 2.5-3.0, 2.6-3.0, 2.7-3.0, 2.8-3.0, or 2.9-3.0 mM KH₂PO₄. In some embodiments, the compound as described herein (e.g., compound (I) or a salt thereof, or compound (II)) is solubilized or diluted in a buffer comprising at least 0, 0.1, 0.2, 0.3, 0.4, 0.5, 0.6, 0.7, 0.8, 0.9, 1.0, 1.1, 1.2, 1.3, 1.4, 1.5, 1.6, 1.7, 1.8, 1.9, 2.0, 2.1, 2.2, 2.3, 2.4, 2.5, 2.6, 2.7, 2.8, 2.9, or 3.0 mM KH₂PO₄. In some embodiments, the compound as described herein (e.g., compound (I) or a salt thereof, or compound (II)) is solubilized or diluted in a buffer comprising at most 0, 0.1, 0.2, 0.3, 0.4, 0.5, 0.6, 0.7, 0.8, 0.9, 1.0, 1.1, 1.2, 1.3, 1.4, 1.5, 1.6, 1.7, 1.8, 1.9, 2.0, 2.1, 2.2, 2.3, 2.4, 2.5, 2.6, 2.7, 2.8, 2.9, or 3.0 mM KH₂PO₄. In some embodiments, the compound as described herein (e.g., compound (I) or a salt thereof, or compound (II)) is solubilized or diluted in a buffer comprising 0.1, 0.2, 0.3, 0.4, 0.5, 0.6, 0.7, 0.8, 0.9, 1.0, 1.1, 1.2, 1.3, 1.4, 1.5, 1.6, 1.7, 1.8, 1.9, 2.0, 2.1, 2.2, 2.3, 2.4, 2.5, 2.6, 2.7, 2.8, 2.9, or 3.0 mM KH₂PO₄.

[0338] In some embodiments, the compound as described herein (e.g., compound (I) or a salt thereof, or compound (II)) is solubilized or diluted in a buffer comprising 0-50 mM NaH₂PO₄.

[0339] In some embodiments, the compound as described herein (e.g., compound (I) or a salt thereof, or compound (II)) is solubilized or diluted in a buffer comprising 0-50, 0-45, 0-40, 0-35, 0-30, 0-25, 0-20, 0-19, 0-18, 0-17, 0-16, 0-15, 0-14, 0-13, 0-12, 0-11, 0-10, 0-9, 0-8, 0-7, 0-6, 0-5, 0-4, 0-3, 0-2, 0-1, 0-0.9, 0-0.8, 0-0.7, 0-0.6, 0-0.5, 0-0.4, 0-0.3, or 0-0.2 mM NaH₂PO₄. In some embodiments, the compound as described herein (e.g., compound (I) or a salt thereof, or compound (II)) is solubilized or diluted in a buffer comprising 0.1-50, 0.1-45, 0.1-40, 0.1-35, 0.1-30, 0.1-25, 0.1-20, 0.1-19, 0.1-18, 0.1-17, 0.1-16, 0.1-15, 0.1-14, 0.1-13, 0.1-12, 0.1-11, 0.1-10, 0.1-9, 0.1-8, 0.1-7, 0.1-6, 0.1-5, 0.1-4, 0.1-3, 0.1-2, 0.1-1, 0.1-0.9, 0.1-0.8, 0.1-0.7, 0.1-0.6, 0.1-0.5, 0.1-0.4, 0.1-0.3, or 0.1-0.2 mM NaH₂PO₄. In some embodiments, the compound as described herein (e.g., compound (I) or a salt thereof, or compound (II)) is solubilized or diluted in a buffer comprising 0-50, 0.1-50, 0.2-50, 0.3-50, 0.4-50, 0.5-50, 0.6-50, 0.7-50, 0.8-50, 0.9-50, 1-50, 2-50, 3-50, 4-50, 5-50, 6-50, 7-50, 8-50, 9-50, 1-50, 11-50, 12-50, 13-50, 14-50, 15-50, 16-50, 17-50, 18-50, 19-50, 20-50, 25-50, 30-50, 35-50, 40-50, or 45-50 mM NaH₂PO₄. In some embodiments, the compound as described herein (e.g., compound (I) or a salt thereof, or compound (II)) is solubilized or diluted in a buffer comprising 0-20, 0.1-20, 0.2-20, 0.3-20, 0.4-20, 0.5-20, 0.6-20, 0.7-20, 0.8-20, 0.9-20, 1-20, 2-20, 3-20, 4-20, 5-20, 6-20, 7-20, 8-20, 9-20, 10-20, 11-20, 12-20, 13-20, 14-20, 15-20, 16-20, 17-20, 18-20, or 19-20 mM NaH₂PO₄. In some embodiments, the compound as described herein (e.g., compound (I) or a salt thereof, or compound (II)) is solubilized or diluted in a buffer comprising at least 0, 0.1, 0.2, 0.3, 0.4, 0.5, 0.6, 0.7, 0.8, 0.9, 1, 2, 3, 4, 5, 6, 7, 8, 9, 10, 11, 12, 13, 14, 15, 16, 17, 18, 19, or 20 mM NaH₂PO₄. In some embodiments, the compound as described herein (e.g., compound (I) or a salt thereof, or compound (II)) is solubilized or diluted in a buffer comprising at most 0, 0.1, 0.2, 0.3, 0.4, 0.5, 0.6, 0.7, 0.8, 0.9, 1, 2, 3, 4, 5, 6, 7, 8, 9, 10, 11, 12, 13, 14, 15, 16, 17, 18, 19, or 20 mM NaH₂PO₄. In some embodiments, the compound as described herein (e.g., compound (I) or a salt thereof, or compound (II)) is solubilized or diluted in a buffer comprising 0, 0.1, 0.2, 0.3, 0.4, 0.5, 0.6, 0.7, 0.8, 0.9, 1, 2, 3, 4, 5, 6, 7, 8, 9, 10, 11, 12, 13, 14, 15, 16, 17, 18, 19, or 20 mM NaH₂PO₄.

[0340] In some embodiments, the compound as described herein (e.g., compound (I) or a salt thereof, or compound (II)) is solubilized or diluted in a buffer further comprising carbohydrates. In some embodiments, the carbohydrates comprise D-glucose. In some embodiments, the compound as described herein (e.g., compound (I) or a salt thereof, or compound (II)) is solubilized or diluted in a buffer further comprising 1-100 mM D-glucose.

[0341] In some embodiments, the compound as described herein (e.g., compound (I) or a salt thereof, or compound (II)) is solubilized or diluted in a buffer comprising 1-100 mM D-glucose.

[0342] In some embodiments, the compound as described herein (e.g., compound (I) or a salt thereof, or compound (II)) is solubilized or diluted in a buffer comprising 1-100, 1-95, 1-90, 1-85, 1-80, 1-75, 1-70, 1-65, 1-60, 1-55, 1-50, 1-45, 1-40, 1-35, 1-30, 1-29, 1-28, 1-27, 1-26, 1-25, 1-24, 1-23, 1-22, 1-21, 1-20, 1-19, 1-18, 1-17, 1-16, 1-15, 1-14, 1-13, 1-12, 1-11, 1-10, 1-9, 1-8, 1-7, 1-6, 1-5, 1-4, 1-3, or 1-2 mM D-glucose. In some embodiments, the compound as described herein (e.g., compound (I) or a salt thereof, or compound (II)) is solubilized or diluted in a buffer comprising 2-100, 3-100, 4-100, 5-100, 6-100, 7-100, 8-100, 9-100, 10-100, 11-100, 12-100, 13-100, 14-100, 15-100, 16-100, 17-100, 18-100, 19-100, 20-100, 21-100, 22-100, 23-100, 24-100, 25-100, 26-100, 29-100, 28-100, 29-100, 30-100, 35-100, 40-100, 45-100, 50-100, 55-100, 60-100, 65-100, 70-100, 75-100, 80-100, 85-100, 90-100, or 95-100 mM D-glucose. In some embodiments, the compound as described herein (e.g., compound (I) or a salt thereof, or compound (II)) is solubilized or diluted in a buffer comprising 2-30, 3-30, 4-30, 5-30, 6-30, 7-30, 8-30, 9-30, 10-30, 11-30, 12-30, 13-30, 14-30, 15-30, 16-30, 17-30, 18-30, 19-30, 20-30, 21-30, 22-30, 23-30, 24-30, 25-30, 26-30, 27-30, 28-30, or 29-30 mM D-glucose. In some embodiments, the compound as described herein (e.g., compound (I) or a salt thereof, or compound (II)) is solubilized or diluted in a buffer comprising at least 1, 2, 3, 4, 5, 6, 7, 8, 9, 10, 11, 12, 13, 14, 15, 16, 17, 18, 19, 20, 21, 22, 23, 24, 25, 26, 27, 28, 29, or 30 mM D-glucose. In some embodiments, the compound as described herein (e.g., compound (I) or a salt thereof, or compound (II)) is solubilized or diluted in a buffer comprising at most 1, 2, 3, 4, 5, 6, 7, 8, 9, 10, 11, 12, 13, 14, 15, 16, 17, 18, 19, 20, 21, 22, 23, 24, 25, 26, 27, 28, 29, or 30 mM D-glucose. In some embodiments, the compound as described herein (e.g., compound (I) or a salt thereof, or compound (II)) is solubilized or diluted in a buffer comprising 1, 2, 3, 4, 5, 6, 7, 8, 9, 10, 11, 12, 13, 14, 15, 16, 17, 18, 19, 20, 21, 22, 23, 24, 25, 26, 27, 28, 29, or 30 mM D-glucose.

[0343] In some embodiments, the compound as described herein (e.g., compound (I) or a salt thereof, or compound (II)) is solubilized or diluted in a buffer comprising 1-100, 1-95, 1-90, 1-85, 1-80, 1-75, 1-70, 1-65, 1-60, 1-55, 1-50, 1-45, 1-40, 1-35, 1-30, 1-29, 1-28, 1-27, 1-26, 1-25, 1-24, 1-23, 1-22, 1-21, 1-20, 1-19, 1-18, 1-17, 1-16, 1-15, 1-14, 1-13, 1-12, 1-11, 1-10, 1-9, 1-8, 1-7, 1-6, 1-5, 1-4, 1-3, or 1-2 mM glucose. In some embodiments, the compound as described herein (e.g., compound (I) or a salt thereof, or compound (II)) is solubilized or diluted in a buffer comprising 2-100, 3-100, 4-100, 5-100, 6-100, 7-100, 8-100, 9-100, 10-100, 11-100, 12-100, 13-100, 14-100, 15-100, 16-100, 17-100, 18-100, 19-100, 20-100, 21-100, 22-100, 23-100, 24-100, 25-100, 26-100, 29-100, 28-100, 29-100, 30-100, 35-100, 40-100, 45-100, 50-100, 55-100, 60-100, 65-100, 70-100, 75-100, 80-100, 85-100, 90-100, or 95-100 mM glucose. In some embodiments, the compound as described herein (e.g., compound (I) or a salt thereof, or compound (II)) is solubilized or diluted in a buffer comprising 2-30, 3-30, 4-30, 5-30, 6-30, 7-30, 8-30, 9-30, 10-30, 11-30, 12-30, 13-30, 14-30, 15-30, 16-30, 17-30, 18-30, 19-30, 20-30, 21-30, 22-30, 23-30, 24-30, 25-30, 26-30, 27-30, 28-30, or 29-30 mM glucose. In some embodiments, the compound as described herein (e.g., compound (I) or a salt thereof, or compound (II)) is solubilized or diluted in a buffer comprising at least 1, 2, 3, 4, 5, 6, 7, 8, 9, 10, 11, 12, 13, 14, 15, 16, 17, 18, 19, 20, 21, 22, 23, 24, 25, 26, 27, 28, 29, or 30 mM glucose. In some embodiments, the compound as described herein (e.g., compound (I) or a salt thereof, or compound (II)) is solubilized or diluted in a buffer comprising at most 1, 2, 3, 4, 5, 6, 7, 8, 9, 10, 11, 12, 13, 14, 15, 16, 17, 18, 19, 20, 21, 22, 23, 24, 25, 26, 27, 28, 29, or 30 mM glucose. In some embodiments, the compound as described herein (e.g., compound (I) or a salt thereof, or compound (II)) is solubilized or diluted in a buffer comprising 1, 2, 3, 4, 5, 6, 7, 8, 9, 10, 11, 12, 13, 14, 15, 16, 17, 18, 19, 20, 21, 22, 23, 24, 25, 26, 27, 28, 29, or 30 mM glucose.

[0344] In some embodiments, the compound as described herein (e.g., compound (I) or a salt thereof, or compound (II)) is solubilized or diluted in a buffer comprising 25-250 mM NaCl, 0.1-20 mM KCl, 0.1-50 mM Na₂HPO₄, 0.1-50 mM NaH₂PO₄, 0.1-50 mM CaCl₂, and 0.1-50 mM MgCl₂.

[0345] In some embodiments, the compound as described herein (e.g., compound (I) or a salt thereof, or compound (II)) is solubilized or diluted in a buffer comprising 150 mM NaCl, 3.0 mM KCl, 0.7 mM Na₂HPO₄, 0.3 mM NaH₂PO₄, 0.79 mM MgCl₂, and 1.4 mM CaCl₂.

[0346] In some embodiments, the compound as described herein (e.g., compound (I) or a salt thereof, or compound (II)) is solubilized or diluted in a buffer further comprising an antioxidant. In some embodiments, the antioxidant is t-butylhydroxyquinoline (TBHQ), butylated hydroxytoluene (BHT), butylated hydroxyanisole (BHA), vitamin E, or any combination thereof. In some embodiments, the compound as described herein (e.g., compound (I) or a salt thereof, or compound (II)) is solubilized or diluted in a buffer further comprising an antioxidant, wherein the antioxidant is ascorbic acid (vitamin C), glutathione, lipoic acid, uric acid, carotenes, α-tocopherol (vitamin E), ubiquinol (coenzyme Q), or any combination thereof.

[0347] In some embodiments, the compound as described herein (e.g., compound (I) or a salt thereof, or compound (II)) is solubilized or diluted in a buffer comprising 25-250 mM NaCl, 0.1-20 mM KCl, 0-50 mM KH₂PO₄, 1-100 mM NaHCO₃, 0-50 mM NaH₂PO₄, 1-100 mM D-glucose, 0.1-50 mM CaCl₂, 0.1-50 mM MgCl₂, or any combination thereof.

[0348] In some embodiments, the compound as described herein (e.g., compound (I) or a salt thereof, or compound (II)) is solubilized or diluted in a buffer comprising 25-250 mM NaCl, 0.1-20 mM KCl, 0-50 mM KH₂PO₄, 1-100 mM NaHCO₃, 0-50 mM NaH₂PO₄, 1-100 mM D-glucose, 0.1-50 mM CaCl₂, and 0.1-50 mM MgCl₂.

[0349] In some embodiments, the compound as described herein (e.g., compound (I) or a salt thereof, or compound (II)) is solubilized or diluted in a buffer comprising 127 mM NaCl, 1.0 mM KCl, 1.2 mM KH₂PO₄, 26 mM NaHCO₃, 10 mM D-glucose, 2.4 mM CaCl₂, and 1.3 mM MgCl₂.

[0350] In some embodiments, the compound as described herein (e.g., compound (I) or a salt thereof, or compound (II)) is solubilized or diluted in a buffer comprising 119 mM NaCl, 26.2 mM NaHCO₃, 2.5 mM KCl, 1 mM NaH₂PO₄, 1.3 mM MgCl₂, 10 mM glucose, and 2.5 mM CaCl₂.

[0351] In some embodiments, the pharmaceutical composition does not comprise a preservative. In some embodiments, the pharmaceutical composition comprises a preservative.

[0352] In some embodiments, the compound as described herein (e.g., compound (I) or a salt thereof, or compound (II)) is present in the pharmaceutical composition at a concentration of from 5-250 mg/mL.

[0353] In some embodiments, the compound as described herein (e.g., compound (I) or a salt thereof, or compound (II)) is present in the pharmaceutical composition at a concentration of from 5-250, 5-247.5, 5-245, 5-242.5, 5-240, 5-237.5, 5-235, 5-232.5, 5-230, 5-227.5, 5-225, 5-225.5, 5-220, 5-217.5, 5-215, 5-212.5, 5-210, 5-205.5, 5-205, 5-202.5, 5-200, 5-197.5, 5-195, 5-192.5, 5-190, 5-187.5, 5-185, 5-182.5, 5-180, 5-177.5, 5-175, 5-172.5, 5-170, 5-167.5, 5-165, 5-162.5, 5-160, 5-157.5, 5-155, 5-152.5, 5-150, 5-147.5, 5-145, 5-142.5, 5-140, 5-137.5, 5-135, 5-132.5, 5-130, 5-127.5, 5-125, 5-122.5, 5-120, 5-117.5, 5-115, 5-112.5, 5-110, 5-107.5, 5-105, 5-102.5, 5-100, 5-97.5, 5-95, 5-92.5, 5-90, 5-87.5, 5-85, 5-82.5, 5-80, 5-77.5, 5-75, 5-72.5, 5-70, 5-67.5, 5-65, 5-62.5, 5-60, 5-57.5, 5-55, 5-52.5, 5-50, 5-47.5, 5-45, 5-42.5, 5-40, 5-37.5, 5-35, 5-32.5, 5-30, 5-27.5, 5-25, 5-22.5, 5-20, 5-17.5, 5-15, 5-12.5, or 5-10 mg/mL. In some embodiments, the compound as described herein (e.g., compound (I) or a salt thereof, or compound (II)) is present in the pharmaceutical composition at a concentration of from 10-250, 15-250, 20-250, 25-250, 30-250, 35-250, 40-250, 45-250, 50-250, 55-250, 60-250, 65-250, 70-250, 75-250, 80-250, 85-250, 90-250, 95-250, 100-250, 105-250, 110-250, 115-250, 120-250, 125-250, 130-250, 135-250, 140-250, 145-250, 150-250, 155-250, 160-250, 165-250, 170-250, 175-250, 180-250, 185-250, 190-250, or 195-250, 200-250, 205-250, 210-250, 215-250, 220-250, 225-250, 230-250, 235-250, 240-250, or 245-250 mg/mL. In some embodiments, the compound as described herein (e.g., compound (I) or a salt thereof, or compound (II)) is present in the pharmaceutical composition at a concentration of from at least 1, 2, 3, 4, 5, 6, 7, 8, 9, 10, 11, 12, 13, 14, 15, 16, 17, 18, 19, 20, 21, 22, 23, 24, 25, 26, 27, 28, 29, 30, 31, 32, 33, 34, 35, 36, 37, 38, 39, 40, 41, 42, 43, 44, 45, 46, 47, 48, 49, 50, 51, 52, 53, 54, 55, 56, 57, 58, 59, 60, 61, 62, 63, 64, 65, 66, 67, 68, 69, 70, 71, 72, 73, 74, 75, 76, 77, 78, 79, 80, 81, 82, 83, 84, 85, 86, 87, 88, 89, 90, 91, 92, 93, 94, 95, 96, 97, 98, 99, 100, 101, 102, 103, 104, 105, 106, 107, 108, 109, 110, 111, 112, 113, 114, 115, 116, 117, 118, 119, 120, 121, 122, 123, 124, 125, 126, 127, 128, 129, 130, 131, 132, 133, 134, 135, 136, 137, 138, 139, 140, 141, 142, 143, 144, 145, 146, 147, 148, 149, 150, 151, 152, 153, 154, 155, 156, 157, 158, 159, 160, 161, 162, 163, 164, 165, 166, 167, 168, 169, 170, 171, 172, 173, 174, 175, 176, 177, 178, 179, 180, 181, 182, 183, 184, 185, 186, 187, 188, 189, 190, 191, 192, 193, 194, 195, 196, 197, 198, 199, 200, 210, 211, 212, 213, 214, 215, 216, 217, 218, 219, 220, 221, 222, 223, 224, 225, 226, 227, 228, 229, 230, 231, 232, 233, 234, 235, 236, 237, 238, 239, 240, 241, 242, 243, 244, 245, 246, 247, 248, 249, or 250 mg/mL. In some embodiments, the compound as described herein (e.g., compound (I) or a salt thereof, or compound (II)) is present in the pharmaceutical composition at a concentration of from at most 1, 2, 3, 4, 5, 6, 7, 8, 9, 10, 11, 12, 13, 14, 15, 16, 17, 18, 19, 20, 21, 22, 23, 24, 25, 26, 27, 28, 29, 30, 31, 32, 33, 34, 35, 36, 37, 38, 39, 40, 41, 42, 43, 44, 45, 46, 47, 48, 49, 50, 51, 52, 53, 54, 55, 56, 57, 58, 59, 60, 61, 62, 63, 64, 65, 66, 67, 68, 69, 70, 71, 72, 73, 74, 75, 76, 77, 78, 79, 80, 81, 82, 83, 84, 85, 86, 87, 88, 89, 90, 91, 92, 93, 94, 95, 96, 97, 98, 99, 100, 101, 102, 103, 104, 105, 106, 107, 108, 109, 110, 111, 112, 113, 114, 115, 116, 117, 118, 119, 120, 121, 122, 123, 124, 125, 126, 127, 128, 129, 130, 131, 132, 133, 134, 135, 136, 137, 138, 139, 140, 141, 142, 143, 144, 145, 146, 147, 148, 149, 150, 151, 152, 153, 154, 155, 156, 157, 158, 159, 160, 161, 162, 163, 164, 165, 166, 167, 168, 169, 170, 171, 172, 173, 174, 175, 176, 177, 178, 179, 180, 181, 182, 183, 184, 185, 186, 187, 188, 189, 190, 191, 192, 193, 194, 195, 196, 197, 198, 199, 200, 210, 211, 212, 213, 214, 215, 216, 217, 218, 219, 220, 221, 222, 223, 224, 225, 226, 227, 228, 229, 230, 231, 232, 233, 234, 235, 236, 237, 238, 239, 240, 241, 242, 243, 244, 245, 246, 247, 248, 249, or 250 mg/mL. In some embodiments, the compound as described herein (e.g., compound (I) or a salt thereof, or compound (II)) is present in the pharmaceutical composition at a concentration of from 1, 2, 3, 4, 5, 6, 7, 8, 9, 10, 11, 12, 13, 14, 15, 16, 17, 18, 19, 20, 21, 22, 23, 24, 25, 26, 27, 28, 29, 30, 31, 32, 33, 34, 35, 36, 37, 38, 39, 40, 41, 42, 43, 44, 45, 46, 47, 48, 49, 50, 51, 52, 53, 54, 55, 56, 57, 58, 59, 60, 61, 62, 63, 64, 65, 66, 67, 68, 69, 70, 71, 72, 73, 74, 75, 76, 77, 78, 79, 80, 81, 82, 83, 84, 85, 86, 87, 88, 89, 90, 91, 92, 93, 94, 95, 96, 97, 98, 99, 100, 101, 102, 103, 104, 105, 106, 107, 108, 109, 110, 111, 112, 113, 114, 115, 116, 117, 118, 119, 120, 121, 122, 123, 124, 125, 126, 127, 128, 129, 130, 131, 132, 133, 134, 135, 136, 137, 138, 139, 140, 141, 142, 143, 144, 145, 146, 147, 148, 149, 150, 151, 152, 153, 154, 155, 156, 157, 158, 159, 160, 161, 162, 163, 164, 165, 166, 167, 168, 169, 170, 171, 172, 173, 174, 175, 176, 177, 178, 179, 180, 181, 182, 183, 184, 185, 186, 187, 188, 189, 190, 191, 192, 193, 194, 195, 196, 197, 198, 199, 200, 210, 211, 212, 213, 214, 215, 216, 217, 218, 219, 220, 221, 222, 223, 224, 225, 226, 227, 228, 229, 230, 231, 232, 233, 234, 235, 236, 237, 238, 239, 240, 241, 242, 243, 244, 245, 246, 247, 248, 249, or 250 mg/mL.

[0354] I In some embodiments, the method comprises administering the pharmaceutical composition as a bolus injection. In some embodiments, the method comprises administering the pharmaceutical composition as a bolus injection over 1 to 180 minutes, 175 minutes, 1 to 170 minutes, 1 to 165 minutes, 1 to 160 minutes, 1 to 155 minutes, 1 to 150 minutes, 1 to 145 minutes, 1 to 140 minutes, 1 to 135 minutes, 1 to 130 minutes, 1 to 125 minutes, 1 to 120 minutes, 1 to 115 minutes, 1 to 110 minutes, 1 to 105 minutes, 1 to 100 minutes, 1 to 95 minutes, 1 to 90 minutes, 1 to 85 minutes, 1 to 80 minutes, 1 to 75 minutes, 1 to 70 minutes, 1 to 65 minutes, 1 to 60 minutes, 1 to 55 minutes, 1 to 50 minutes, 1 to 45 minutes, 1 to 40 minutes, 1 to 35 minutes, 1 to 30 minutes, 1 to 25 minutes, 1 to 20 minutes, 1 to 15 minutes, 1 to 10 minutes, 1 to 5 minutes, or 1 to 3 minutes. In some embodiments, the method comprises administering the pharmaceutical composition as a bolus injection using a spinal anesthesia needle.

[0355] In some embodiments, the compound as described herein (e.g., compound (I) or a salt thereof, or compound (II)) is present in the pharmaceutical composition at a concentration of from 0.1 mg/mL to 250 mg/mL. In some embodiments, the compound as described herein (e.g., compound (I) or a salt thereof, or compound (II)) is present in the pharmaceutical composition at a concentration of about 0.1 mg/mL, 0.5 mg/mL, 1 mg/mL, 2 mg/mL, 2.5 mg/mL, 3 mg/mL, 4 mg/mL, 5 mg/mL, 6 mg/mL, 7 mg/mL, 8 mg/mL, 9 mg/mL, 10 mg/mL, 11 mg/mL, 12 mg/mL, 13 mg/mL, 14 mg/mL, 15 mg/mL, 16 mg/mL, 17 mg/mL, 18 mg/mL, 19 mg/mL, or 20 mg/mL. In some embodiments, the compound as described herein (e.g., compound (I) or a salt thereof, or compound (II)) is present in the pharmaceutical composition at a concentration of about 30 mg/mL, 40 mg/mL, 50 mg/mL, 60 mg/mL, 70 mg/mL, 80 mg/mL, 90 mg/mL, 100 mg/mL, 110 mg/mL, 120 mg/mL, 130 mg/mL, 140 mg/mL, 150 mg/mL, 160 mg/mL, 170 mg/mL, 180 mg/mL, 190 mg/mL, or 200 mg/mL. In some embodiments, the compound as described herein (e.g., compound (I) or a salt thereof, or compound (II)) is present in the pharmaceutical composition at a concentration of about 11 mg/mL, 22 mg/mL, 33 mg/mL, 44 mg/mL, 55 mg/mL, 66 mg/mL, 77 mg/mL, 88 mg/mL, 99 mg/mL, or 100 mg/mL in the diluent.

[0356] In some embodiments, the compound as described herein (e.g., compound (I) or a salt thereof, or compound (II)) is present in the pharmaceutical composition at a concentration of from 0.1 mg/mL to 250 mg/mL, from 0.2 mg/mL to 250 mg/mL, from 0.3 mg/mL to 250 mg/mL, from 0.4 mg/mL to 250 mg/mL, from 0.5 mg/mL to 250 mg/mL, from 0.6 mg/mL to 250 mg/mL, from 0.7 mg/mL to 250 mg/mL, from 0.8 mg/mL to 250 mg/mL, from 0.9 mg/ml to 250 mg/mL, from 1.0 mg/mL to 250 mg/mL, from 1.1 mg/mL to 250 mg/mL, from 1.2 mg/mL to 250 mg/mL, from 1.3 mg/mL to 250 mg/mL, from 1.4 mg/mL to 250 mg/mL, from 1.5 mg/mL to 250 mg/mL, from 1.6 mg/mL to 250 mg/mL, from 1.7 mg/mL to 250 mg/mL, from 1.8 mg/mL to 250 mg/mL, from 1.9 mg/mL to 250 mg/mL, from 2.0 mg/mL to 250 mg/mL, from 2.1 mg/mL to 250 mg/mL, from 2.2 mg/mL to 250 mg/mL, from 2.3 mg/mL to 250 mg/mL, from 2.4 mg/mL to 250 mg/mL, from 2.5 mg/mL to 250 mg/mL, from 2.6 mg/mL to 250 mg/mL, from 2.7 mg/mL to 250 mg/mL, from 2.8 mg/mL to 250 mg/mL, from 2.9 mg/mL to 250 mg/mL, from 3.0 mg/mL to 250 mg/mL, from 3.1 mg/mL to 250 mg/mL, from 3.2 mg/mL to 250 mg/mL, from 3.3 mg/mL to 250 mg/mL, from 3.4 mg/mL to 250 mg/mL, from 3.5 mg/mL to 250 mg/mL, from 3.6 mg/mL to 250 mg/mL, from 3.7 mg/mL to 250 mg/mL, from 3.8 mg/mL to 250 mg/mL, from 3.9 mg/mL to 250 mg/mL, from 4.0 mg/mL to 250 mg/mL, from 5.0 mg/mL to 250 mg/mL, from 6.0 mg/mL to 250 mg/mL, from 7.0 mg/mL to 250 mg/mL, from 8.0 mg/mL to 250 mg/mL, from 9.0 mg/mL to 250 mg/mL, from 10 mg/mL to 250 mg/mL, from 15 mg/mL to 250 mg/mL, from 20 mg/mL to 250 mg/mL, from 25 mg/mL to 250 mg/mL, from 30 mg/mL to 250 mg/mL, from 35 mg/mL to 250 mg/mL, from 40 mg/mL to 250 mg/mL, from 45 mg/mL to 250 mg/mL, from 50 mg/mL to 250 mg/mL, from 55 mg/mL to 250 mg/mL, from 60 mg/mL to 250 mg/mL, from 65 mg/mL to 250 mg/mL, from 70 mg/mL to 250 mg/mL, from 75 mg/mL to 250 mg/mL, from 80 mg/mL to 250 mg/mL, from 85 mg/mL to 250 mg/mL, from 90 mg/mL to 250 mg/mL, from 95 mg/mL to 250 mg/mL, from 100 mg/mL to 250 mg/mL, from 105 mg/mL to 250 mg/mL, from 110 mg/mL to 250 mg/mL, from 115 mg/mL to 250 mg/mL, from 120 mg/mL to 250 mg/mL, from 125 mg/mL to 250 mg/mL, from 130 mg/mL to 250 mg/mL, from 135 mg/mL to 250 mg/mL, from 140 mg/mL to 250 mg/mL, from 145 mg/mL to 250 mg/mL, from 150 mg/mL to 250 mg/mL, from 155 mg/mL to 250 mg/mL, from 160 mg/mL to 250 mg/mL, from 165 mg/mL to 250 mg/mL, from 170 mg/mL to 250 mg/mL, from 175 mg/mL to 250 mg/mL, from 180 mg/mL to 250 mg/mL, from 185 mg/mL to 250 mg/mL, from 190 mg/mL to 250 mg/mL, from 195 mg/mL to 250 mg/mL, from 200 mg/mL to 250 mg/mL, from 205 mg/mL to 250 mg/mL, from 210 mg/mL to 250 mg/mL, from 215 mg/mL to 250 mg/mL, from 220 mg/mL to 250 mg/mL, from 225 mg/mL to 250 mg/mL, from 230 mg/mL to 250 mg/mL, from 235 mg/mL to 250 mg/mL, from 240 mg/mL to 250 mg/mL, or from 245 mg/mL to 250 mg/mL.

[0357] In some embodiments, the compound as described herein (e.g., compound (I) or a salt thereof, or compound (II)) is present in the pharmaceutical composition at a concentration of from 0.1 mg/mL to 250 mg/mL, from 0.1 mg/mL to 245 mg/mL, from 0.1 mg/mL to 240 mg/mL, from 0.1 mg/mL to 235 mg/mL, from 0.1 mg/mL to 230 mg/mL, from 0.1 mg/mL to 225 mg/mL, from 0.1 mg/mL to 220 mg/mL, from 0.1 mg/mL to 215 mg/mL, from 0.1 mg/mL to 210 mg/mL, from 0.1 mg/mL to 205 mg/mL, from 0.1 mg/mL to 200 mg/mL, from 0.1 mg/mL to 195 mg/mL, from 0.1 mg/mL to 190 mg/mL, from 0.1 mg/mL to 185 mg/mL, from 0.1 mg/mL to 180 mg/mL, from 0.1 mg/mL to 175 mg/mL, from 0.1 mg/mL to 170 mg/mL, from 0.1 mg/mL to 165 mg/mL, from 0.1 mg/mL to 160 mg/mL, from 0.1 mg/mL to 155 mg/mL, from 0.1 mg/mL to 150 mg/mL, from 0.1 mg/mL to 145 mg/mL, from 0.1 mg/mL to 140 mg/mL, from 0.1 mg/mL to 135 mg/mL, from 0.1 mg/mL to 130 mg/mL, from 0.1 mg/mL to 125 mg/mL, from 0.1 mg/mL to 120 mg/mL, from 0.1 mg/mL to 115 mg/mL, from 0.1 mg/mL to 110 mg/mL, from 0.1 mg/mL to 100 mg/mL, from 0.1 mg/mL to 95 mg/mL, from 0.1 mg/mL to 90 mg/mL, from 0.1 mg/mL to 85 mg/mL, from 0.1 mg/mL to 80 mg/mL, from 0.1 mg/mL to 75 mg/mL, from 0.1 mg/mL to 70 mg/mL, from 0.1 mg/mL to 65 mg/mL, from 0.1 mg/mL to 60 mg/mL, from 0.1 mg/mL to 55 mg/mL, from 0.1 mg/mL to 50 mg/mL, from 0.1 mg/mL to 45 mg/mL, from 0.1 mg/mL to 40 mg/mL, from 0.1 mg/mL to 35 mg/mL, from 0.1 mg/mL to 30 mg/mL, from 0.1 mg/mL to 25 mg/mL, from 0.1 mg/mL to 20 mg/mL, from 0.1 mg/mL to 15 mg/mL, from 0.1 mg/mL to 10 mg/mL, from 0.1 mg/mL to 9 mg/mL, from 0.1 mg/mL to 8 mg/mL, from 0.1 mg/mL to 7 mg/mL, from 0.1 mg/mL to 6 mg/mL, from 0.1 mg/mL to 5 mg/mL, from 0.1 mg/mL to 4 mg/mL, from 0.1 mg/mL to 3.9 mg/mL, from 0.1 mg/mL to 3.8 mg/mL, from 0.1 mg/mL to 3.7 mg/mL, from 0.1 mg/mL to 3.6 mg/mL, from 0.1 mg/mL to 3.5 mg/mL, from 0.1 mg/mL to 3.4 mg/mL, from 0.1 mg/mL to 3.3 mg/mL, from 0.1 mg/mL to 3.2 mg/mL, from 0.1 mg/mL to 3.1 mg/mL, from 0.1 mg/mL to 3.0 mg/mL, from 0.1 mg/mL to 2.9 mg/mL, from 0.1 mg/mL to 2.8 mg/mL, from 0.1 mg/mL to 2.7 mg/mL, from 0.1 mg/mL to 2.6 mg/mL, from 0.1 mg/mL to 2.5 mg/mL, from 0.1 mg/mL to 2.4 mg/mL, from 0.1 mg/mL to 2.3 mg/mL, from 0.1 mg/mL to 2.2 mg/mL, from 0.1 mg/mL to 2.1 mg/mL, from 0.1 mg/mL to 2.0 mg/mL, from 0.1 mg/mL to 1.9 mg/mL, from 0.1 mg/mL to 1.8 mg/mL, from 0.1 mg/mL to 1.7 mg/mL, from 0.1 mg/mL to 1.6 mg/mL, from 0.1 mg/mL to 1.5 mg/mL, from 0.1 mg/mL to 1.4 mg/mL, from 0.1 mg/mL to 1.3 mg/mL, from 0.1 mg/mL to 1.2 mg/mL, from 0.1 mg/mL to 1.1 mg/mL, from 0.1 mg/mL to 1.0 mg/mL, from 0.1 mg/mL to 0.9 mg/mL, from 0.1 mg/mL to 0.8 mg/mL, from 0.1 mg/mL to 0.7 mg/mL, from 0.1 mg/mL to 0.6 mg/mL, from 0.1 mg/mL to 0.5 mg/mL, from 0.1 mg/mL to 0.4 mg/mL, from 0.1 mg/mL to 0.3 mg/mL, or from 0.1 mg/mL to 0.2 mg/mL.

[0358] In some embodiments, the compound as described herein (e.g., compound (I) or a salt thereof, or compound (II)) is present in the pharmaceutical composition at a concentration of at least 0.1, 0.2, 0.3, 0.4, 0.5, 0.6, 0.7, 0.8, 0.9, 1.0, 1.1, 1.2, 1.3, 1.4, 1.5, 1.6, 1.7, 1.8, 1.9, 2.0, 2.1, 2.2, 2.3, 2.4, 2.5, 2.6, 2.7, 2.8, 2.9, 3.0, 3.1, 3.2, 3.3, 3.4, 3.5, 3.6, 3.7, 3.8, 3.9, 4.0, 4.1, 4.2, 4.3, 4.4, 4.5, 4.6, 4.7, 4.8, 4.9, 5, 6, 7, 8, 9, 10, 11, 12, 13, 14, 15, 16, 17, 18, 19, 20, 21, 22, 23, 24, 25, 26, 27, 28, 29, 30, 31, 32, 33, 34, 35, 36, 37, 38, 39, 40, 41, 42, 43, 44, 45, 46, 47, 48, 49, 50, 51, 52, 53, 54, 55, 56, 57, 58, 59, 60, 61, 62, 63, 64, 65, 66, 67, 68, 69, 70, 71, 72, 73, 74, 75, 76, 77, 78, 79, 80, 81, 82, 83, 84, 85, 86, 87, 88, 89, 90, 91, 92, 93, 94, 95, 96, 97, 98, 99, 100, 101, 102, 103, 104, 105, 106, 107, 108, 109, 110, 111, 112, 113, 114, 115, 116, 117, 118, 119, 120, 121, 122, 123, 124, 125, 126, 127, 128, 129, 130, 131, 132, 133, 134, 135, 136, 137, 138, 139, 140, 141, 142, 143, 144, 145, 146, 147, 148, 149, 150, 151, 152, 153, 154, 155, 156, 157, 158, 159, 160, 161, 162, 163, 164, 165, 166, 167, 168, 169, 170, 171, 172, 173, 174, 175, 176, 177, 178, 179, 180, 181, 182, 183, 184, 185, 186, 187, 188, 189, 190, 191, 192, 193, 194, 195, 196, 197, 198, 199, 200, 210, 211, 212, 213, 214, 215, 216, 217, 218, 219, 220, 221, 222, 223, 224, 225, 226, 227, 228, 229, 230, 231, 232, 233, 234, 235, 236, 237, 238, 239, 240, 241, 242, 243, 244, 245, 246, 247, 248, 249, or 250 mg/mL in the diluent. In some embodiments, the compound as described herein (e.g., compound (I) or a salt thereof, or compound (II)) is present in the pharmaceutical composition at a concentration of at most 0.1, 0.2, 0.3, 0.4, 0.5, 0.6, 0.7, 0.8, 0.9, 1.0, 1.1, 1.2, 1.3, 1.4, 1.5, 1.6, 1.7, 1.8, 1.9, 2.0, 2.1, 2.2, 2.3, 2.4, 2.5, 2.6, 2.7, 2.8, 2.9, 3.0, 3.1, 3.2, 3.3, 3.4, 3.5, 3.6, 3.7, 3.8, 3.9, 4.0, 4.1, 4.2, 4.3, 4.4, 4.5, 4.6, 4.7, 4.8, 4.9, 5, 6, 7, 8, 9, 10, 11, 12, 13, 14, 15, 16, 17, 18, 19, 20, 21, 22, 23, 24, 25, 26, 27, 28, 29, 30, 31, 32, 33, 34, 35, 36, 37, 38, 39, 40, 41, 42, 43, 44, 45, 46, 47, 48, 49, 50, 51, 52, 53, 54, 55, 56, 57, 58, 59, 60, 61, 62, 63, 64, 65, 66, 67, 68, 69, 70, 71, 72, 73, 74, 75, 76, 77, 78, 79, 80, 81, 82, 83, 84, 85, 86, 87, 88, 89, 90, 91, 92, 93, 94, 95, 96, 97, 98, 99, 100, 101, 102, 103, 104, 105, 106, 107, 108, 109, 110, 111, 112, 113, 114, 115, 116, 117, 118, 119, 120, 121, 122, 123, 124, 125, 126, 127, 128, 129, 130, 131, 132, 133, 134, 135, 136, 137, 138, 139, 140, 141, 142, 143, 144, 145, 146, 147, 148, 149, 150, 151, 152, 153, 154, 155, 156, 157, 158, 159, 160, 161, 162, 163, 164, 165, 166, 167, 168, 169, 170, 171, 172, 173, 174, 175, 176, 177, 178, 179, 180, 181, 182, 183, 184, 185, 186, 187, 188, 189, 190, 191, 192, 193, 194, 195, 196, 197, 198, 199, 200, 210, 211, 212, 213, 214, 215, 216, 217, 218, 219, 220, 221, 222, 223, 224, 225, 226, 227, 228, 229, 230, 231, 232, 233, 234, 235, 236, 237, 238, 239, 240, 241, 242, 243, 244, 245, 246, 247, 248, 249, or 250 mg/mL in the diluent. In some embodiments, the compound as described herein (e.g., compound (I) or a salt thereof, or compound (II)) is present in the pharmaceutical composition at a concentration of 0.1, 0.2, 0.3, 0.4, 0.5, 0.6, 0.7, 0.8, 0.9, 1.0, 1.1, 1.2, 1.3, 1.4, 1.5, 1.6, 1.7, 1.8, 1.9, 2.0, 2.1, 2.2, 2.3, 2.4, 2.5, 2.6, 2.7, 2.8, 2.9, 3.0, 3.1, 3.2, 3.3, 3.4, 3.5, 3.6, 3.7, 3.8, 3.9, 4.0, 4.1, 4.2, 4.3, 4.4, 4.5, 4.6, 4.7, 4.8, 4.9, 5, 6, 7, 8, 9, 10, 11, 12, 13, 14, 15, 16, 17, 18, 19, 20, 21, 22, 23, 24, 25, 26, 27, 28, 29, 30, 31, 32, 33, 34, 35, 36, 37, 38, 39, 40, 41, 42, 43, 44, 45, 46, 47, 48, 49, 50, 51, 52, 53, 54, 55, 56, 57, 58, 59, 60, 61, 62, 63, 64, 65, 66, 67, 68, 69, 70, 71, 72, 73, 74, 75, 76, 77, 78, 79, 80, 81, 82, 83, 84, 85, 86, 87, 88, 89, 90, 91, 92, 93, 94, 95, 96, 97, 98, 99, 100, 101, 102, 103, 104, 105, 106, 107, 108, 109, 110, 111, 112, 113, 114, 115, 116, 117, 118, 119, 120, 121, 122, 123, 124, 125, 126, 127, 128, 129, 130, 131, 132, 133, 134, 135, 136, 137, 138, 139, 140, 141, 142, 143, 144, 145, 146, 147, 148, 149, 150, 151, 152, 153, 154, 155, 156, 157, 158, 159, 160, 161, 162, 163, 164, 165, 166, 167, 168, 169, 170, 171, 172, 173, 174, 175, 176, 177, 178, 179, 180, 181, 182, 183, 184, 185, 186, 187, 188, 189, 190, 191, 192, 193, 194, 195, 196, 197, 198, 199, 200, 210, 211, 212, 213, 214, 215, 216, 217, 218, 219, 220, 221, 222, 223, 224, 225, 226, 227, 228, 229, 230, 231, 232, 233, 234, 235, 236, 237, 238, 239, 240, 241, 242, 243, 244, 245, 246, 247, 248, 249, or 250 mg/mL in the diluent.

[0359] Pharmaceutical compositions comprising the compound, e.g., antisense oligomer, of the described compositions and for use in any of the described methods can be prepared according to conventional techniques well known in the pharmaceutical industry and described in the published literature. In some embodiments, a pharmaceutical composition for treating a subject comprises an effective amount of any compound as described herein, or a pharmaceutically acceptable salt, solvate, hydrate or ester thereof. In some embodiments, the pharmaceutical composition described herein further comprises a pharmaceutically acceptable excipient, carrier or diluent.

[0360] Pharmaceutical compositions can be formulated in a conventional manner using one or more pharmaceutically acceptable inactive ingredients that facilitate processing of the active compounds into preparations that can be used pharmaceutically. A proper formulation is dependent upon the route of administration chosen and a summary of pharmaceutical compositions can be found, for example, in Remington: The Science and Practice of Pharmacy, Nineteenth Ed (Easton, Pa.: Mack Publishing Company, 1995); Hoover, John E., Remington's Pharmaceutical Sciences, Mack Publishing Co., Easton, Pennsylvania 1975; Liberman, H. A. and Lachman, L., Eds., Pharmaceutical Dosage Forms, Marcel Decker, New York, N.Y., 1980; and Pharmaceutical Dosage Forms and Drug Delivery Systems, Seventh Ed. (Lippincott Williams & Wilkins 1999), herein incorporated by reference. In some embodiments, the pharmaceutical composition facilitates administration of the compound to an organism.

[0361] Such compositions may comprise buffers such as neutral buffered saline, phosphate buffered saline and the like; carbohydrates such as glucose, mannose, sucrose or dextrans, mannitol; proteins; polypeptides or amino acids such as glycine; antioxidants; chelating agents such as EDTA or glutathione; adjuvants (e.g., aluminum hydroxide); and preservatives.

[0362] The terms “pharmaceutical composition” and “pharmaceutical formulation” (or “formulation”) are used interchangeably and denote a mixture or solution comprising a therapeutically effective amount of an active pharmaceutical ingredient together with one or more pharmaceutically acceptable excipients to be administered to a subject, e.g., a human in need thereof.

[0363] The term “pharmaceutically acceptable” denotes an attribute of a material which is useful in preparing a pharmaceutical composition that is generally safe, non-toxic, and neither biologically nor otherwise undesirable and is acceptable for veterinary as well as human pharmaceutical use. “Pharmaceutically acceptable” can refer a material, such as a carrier or diluent, which does not abrogate the biological activity or properties of the compound, and is relatively nontoxic, i.e., the material may be administered to an individual without causing undesirable biological effects or interacting in a deleterious manner with any of the components of the composition in which it is contained.

[0364] The terms “pharmaceutically acceptable excipient”, “pharmaceutically acceptable carrier” and “therapeutically inert excipient” can be used interchangeably and denote any pharmaceutically acceptable ingredient in a pharmaceutical composition having no therapeutic activity and being non-toxic to the human subject administered, such as disintegrators, binders, fillers, solvents, buffers, tonicity agents, stabilizers, antioxidants, surfactants, carriers, diluents, excipients, preservatives or lubricants used in formulating pharmaceutical products.

[0365] In some embodiments, the compositions are prepared with carriers that will protect the components of the composition against rapid elimination from the body, such as a controlled release formulation, including implants and microencapsulated delivery systems. Biodegradable, biocompatible polymers can be used, such as ethylene vinyl acetate, polyanhydrides, polyglycolic acid, collagen, polyorthoesters, and polylactic acid. Methods for preparation of such formulations will be apparent to those skilled in the art. The materials can also be obtained commercially from Alza Corporation and Nova Pharmaceuticals, Inc. Liposomal suspensions (including liposomes targeted to infected cells with monoclonal antibodies to viral anti-gens) can also be used as pharmaceutically acceptable carriers. These can be prepared according to methods known to those skilled in the art, for example, as described in U.S. Pat. No. 4,522,811, of which entire content is incorporated herein by reference.

[0366] Pharmaceutical compositions or formulations comprising the compound, e.g., antisense oligomer, of the described compositions and for use in any of the described methods can be prepared according to conventional techniques well known in the pharmaceutical industry and described in the published literature. In some embodiments, a pharmaceutical composition or formulation for treating a subject comprises an effective amount of any compound as described herein, or a pharmaceutically acceptable salt, solvate, hydrate or ester thereof. The pharmaceutical formulation comprising the compound may further comprise a pharmaceutically acceptable excipient, diluent or carrier.

[0367] Pharmaceutically acceptable salts are suitable for use in contact with the tissues of humans and lower animals without undue toxicity, irritation, allergic response, etc., and are commensurate with a reasonable benefit/risk ratio. (See, e.g., S. M. Berge, et al., J. Pharmaceutical Sciences, 66:1-19 (1977), incorporated herein by reference for this purpose. The salts can be prepared in situ during the final isolation and purification of the compounds, or separately by reacting the free base function with a suitable organic acid. Examples of pharmaceutically acceptable, nontoxic acid addition salts are salts of an amino group formed with inorganic acids such as hydrochloric acid, hydrobromic acid, phosphoric acid, sulfuric acid and perchloric acid or with organic acids such as acetic acid, oxalic acid, maleic acid, tartaric acid, citric acid, succinic acid or malonic acid or by using other documented methodologies such as ion exchange. Other pharmaceutically acceptable salts include adipate, alginate, ascorbate, aspartate, benzenesulfonate, benzoate, bisulfate, borate, butyrate, camphorate, camphorsulfonate, citrate, cyclopentanepropionate, digluconate, dodecylsulfate, ethanesulfonate, formate, fumarate, glucoheptonate, glycerophosphate, gluconate, hemisulfate, heptanoate, hexanoate, hydroiodide, 2-hydroxy-ethanesulfonate, lactobionate, lactate, laurate, lauryl sulfate, malate, maleate, malonate, methanesulfonate, 2-naphthalenesulfonate, nicotinate, nitrate, oleate, oxalate, palmitate, pamoate, pectinate, persulfate, 3-phenylpropionate, phosphate, picrate, pivalate, propionate, stearate, succinate, sulfate, tartrate, thiocyanate, p-toluenesulfonate, undecanoate, valerate salts, and the like. Representative alkali or alkaline earth metal salts include sodium, lithium, potassium, calcium, magnesium, and the like. Further pharmaceutically acceptable salts include, when appropriate, nontoxic ammonium, quaternary ammonium, and amine cations formed using counterions such as halide, hydroxide, carboxylate, sulfate, phosphate, nitrate, lower alkyl sulfonate and aryl sulfonate.

[0368] In some embodiments, provided herein is a method of producing the pharmaceutical composition as described herein.

### Pharmaceutical Formulation

[0369] In some aspects, provided herein is a pharmaceutical formulation comprising: a compound (e.g., an ASO) as described herein, wherein the compound as described herein (e.g., compound (I) or a salt thereof, or compound (II)) comprises a sequence with at least 80% sequence identity to any one of SEQ ID NOs: 21-67, 210-256 or 304-1099; and a pharmaceutically acceptable diluent; wherein about 0.1, 0.5, 1, 2.5, 5, 6, 7, 8, 9, 10, 11, 12, 13, 14, 15, 16, 17, 18, 19, 20, 22.5, 25, 27.5, 30, 32.5, 35, 37.5, 40, 42.5, 45, 47.5, 50, 52.5, 55, 57.5, 60, 62.5, 65, 67.5, 70, 72.5, 75, 77.5, 80, 82.5, 85, 87.5, 90, 92.5, 95, 97.5, 100, 102.5, 105, 107.5, 110, 112.5, 115, 117.5, 120, 122.5, 125, 127.5, 130, 132.5, 135, 137.5, 140, 142.5, 145, 147.5, 150, 152.5, 155, 157.5, 160, 162.5, 165, 167.5, 170, 172.5, 175, 177.5, 180, 182.5, 185, 187.5, 190, 192.5, 195, 197.5, 200, 202.5, 205, 207.5, 210, 212.5, 215, 217.5, 220, 222.5, 225, 227.5, 230, 232.5, 235, 237.5, 240, 242.5, 245, 247.5, or 250 mg of the compound as described herein (e.g., compound (I) or a salt thereof, or compound (II)) is dissolved or suspended in a solution at a concentration of from 0.1-250 mg/mL. In some embodiments, the ASO as described herein comprises a sequence with at least 80% sequence identity to any one of the sequences listed in listed in Tables 4A, 4B, 5A, 5B, 6A, 6B, 7, 8A, and 8B.

[0370] In some embodiments, the ASO as described herein comprises a sequence with at least 60%, 65%, 66%, 67%, 68%, 69%, 70%, 71%, 72%, 73%, 74%, 75%, 76%, 77%, 78%, 79%, 80%, 81%, 82%, 83%, 884%, 85%, 86%, 87%, 88%, 89%, 90%, 91%, 92%, 93%, 94%, 95%, 96%, 97%, 98%, 99%, 99.5%, 99.8%, 99.9%, or 100% sequence identity to any one of SEQ ID NOs: 21-67, 210-256 or 304-1099. In some embodiments, the ASO as described herein consists of a sequence with at least 60%, 65%, 66%, 67%, 68%, 69%, 70%, 71%, 72%, 73%, 74%, 75%, 76%, 77%, 78%, 79%, 80%, 81%, 82%, 83%, 884%, 85%, 86%, 87%, 88%, 89%, 90%, 91%, 92%, 93%, 94%, 95%, 96%, 97%, 98%, 99%, 99.5%, 99.8%, 99.9%, or 100% sequence identity to any one of SEQ ID NOs: 21-67, 210-256 or 304-1099. In some embodiments, the ASO as described herein consists of a sequence with at least 60%, 65%, 66%, 67%, 68%, 69%, 70%, 71%, 72%, 73%, 74%, 75%, 76%, 77%, 78%, 79%, 80%, 81%, 82%, 83%, 884%, 85%, 86%, 87%, 88%, 89%, 90%, 91%, 92%, 93%, 94%, 95%, 96%, 97%, 98%, 99%, 99.5%, 99.8%, 99.9%, or 100% sequence identity to any one of the sequences listed in listed in Tables 4A, 4B, 5A, 5B, 6A, 6B, 7, 8A, and 8B.

[0371] In some embodiments, about 1-500, 2-500, 3-500, 4-500, 5-500, 6-500, 7-500, 8-500, 9-500, 10-500, 15-500, 20-500, 25-500, 30-500, 35-500, 40-500, 45-500, 50-500, 55-500, 60-500, 65-500, 70-500, 75-500, 80-500, 85-500, 90-500, 95-500, 100-500, 105-500, 110-500, 115-500, 120-500, 125-500, 130-500, 135-500, 140-500, 145-500, 150-500, 155-500, 160-500, 165-500, 170-500, 175-500, 180-500, 185-500, 190-500, 195-500, 205-500, 210-500, 215-500, 220-500, 225-500, 230-500, 235-500, 240-500, 245-500, 250-500, 255-500, 260-500, 265-500, 270-500, 275-500, 280-500, 285-500, 290-500, 295-500, 300-500, 305-500, 310-500, 315-500, 320-500, 325-500, 330-500, 335-500, 340-500, 345-500, 350-500, 355-500, 360-500, 365-500, 370-500, 375-500, 380-500, 385-500, 390-500, 395-500, 400-500, 405-500, 410-500, 415-500, 420-500, 425-500, 430-500, 435-500, 440-500, 445-500, 450-500, 455-500, 460-500, 465-500, 470-500, 475-500, 480-500, 485-500, 490-500, or 495-500 mg of the compound as described herein (e.g., compound (I) or a salt thereof, or compound (II)) is dissolved or suspended in a solution at a concentration of from 5-200 mg/mL. In some embodiments, about 1-495, 1-490, 1-485, 1-480, 1-475, 1-470, 1-465, 1-460, 1-455, 1-450, 1-445, 1-440, 1-435, 1-430, 1-425, 1-420, 1-415, 1-410, 1-405, 1-400, 1-395, 1-390, 1-385, 1-380, 1-375, 1-370, 1-365, 1-360, 1-355, 1-350, 1-345, 1-340, 1-335, 1-330, 1-325, 1-320, 1-315, 1-310, 1-305, 1-300, 1-295, 1-290, 1-285, 1-280, 1-275, 1-270, 1-265, 1-260, 1-255, 1-250, 1-245, 1-240, 1-235, 1-230, 1-225, 1-220, 1-215, 1-210, 1-205, 1-200, 1-195, 1-190, 1-185, 1-180, 1-175, 1-170, 1-165, 1-160, 1-155, 1-150, 1-145, 1-140, 1-135, 1-130, 1-125, 1-120, 1-115, 1-110, 1-105, 1-100, 1-95, 1-90, 1-85, 1-80, 1-75, 1-70, 1-65, 1-60, 1-55, 1-0, 1-45, 1-40, 1-35, 1-30, 1-25, 1-20, 1-15, 1-10, 1-9, 1-8, 1-7, 1-6, 1-5, 1-4, 1-3, or 1-2 mg of the compound as described herein (e.g., compound (I) or a salt thereof, or compound (II)) is dissolved or suspended in a solution at a concentration of from 5-200 mg/mL.

[0372] In some embodiments, at least about 0.1, 0.5, 1, 2.5, 5, 6, 7, 8, 9, 10, 11, 12, 13, 14, 15, 16, 17, 18, 19, 20, 22.5, 25, 27.5, 30, 32.5, 35, 37.5, 40, 42.5, 45, 47.5, 50, 52.5, 55, 57.5, 60, 62.5, 65, 67.5, 70, 72.5, 75, 77.5, 80, 82.5, 85, 87.5, 90, 92.5, 95, 97.5, 100, 102.5, 105, 107.5, 110, 112.5, 115, 117.5, 120, 122.5, 125, 127.5, 130, 132.5, 135, 137.5, 140, 142.5, 145, 147.5, 150, 152.5, 155, 157.5, 160, 162.5, 165, 167.5, 170, 172.5, 175, 177.5, 180, 182.5, 185, 187.5, 190, 192.5, 195, 197.5, 200, 202.5, 205, 207.5, 210, 212.5, 215, 217.5, 220, 222.5, 225, 227.5, 230, 232.5, 235, 237.5, 240, 242.5, 245, 247.5, or 250 mg of the compound as described herein (e.g., compound (I) or a salt thereof, or compound (II)) is dissolved or suspended in a solution at a concentration of from 0.1-250 mg/mL. In some embodiments, at most about 0.1, 0.5, 1, 2.5, 5, 6, 7, 8, 9, 10, 11, 12, 13, 14, 15, 16, 17, 18, 19, 20, 22.5, 25, 27.5, 30, 32.5, 35, 37.5, 40, 42.5, 45, 47.5, 50, 52.5, 55, 57.5, 60, 62.5, 65, 67.5, 70, 72.5, 75, 77.5, 80, 82.5, 85, 87.5, 90, 92.5, 95, 97.5, 100, 102.5, 105, 107.5, 110, 112.5, 115, 117.5, 120, 122.5, 125, 127.5, 130, 132.5, 135, 137.5, 140, 142.5, 145, 147.5, 150, 152.5, 155, 157.5, 160, 162.5, 165, 167.5, 170, 172.5, 175, 177.5, 180, 182.5, 185, 187.5, 190, 192.5, 195, 197.5, 200, 202.5, 205, 207.5, 210, 212.5, 215, 217.5, 220, 222.5, 225, 227.5, 230, 232.5, 235, 237.5, 240, 242.5, 245, 247.5, or 250 mg of the compound as described herein (e.g., compound (I) or a salt thereof, or compound (II)) is dissolved or suspended in a solution at a concentration of from 0.1-250 mg/mL. In some embodiments, about 0.1, 0.5, 1, 2.5, 5, 6, 7, 8, 9, 10, 11, 12, 13, 14, 15, 16, 17, 18, 19, 20, 22.5, 25, 27.5, 30, 32.5, 35, 37.5, 40, 42.5, 45, 47.5, 50, 52.5, 55, 57.5, 60, 62.5, 65, 67.5, 70, 72.5, 75, 77.5, 80, 82.5, 85, 87.5, 90, 92.5, 95, 97.5, 100, 102.5, 105, 107.5, 110, 112.5, 115, 117.5, 120, 122.5, 125, 127.5, 130, 132.5, 135, 137.5, 140, 142.5, 145, 147.5, 150, 152.5, 155, 157.5, 160, 162.5, 165, 167.5, 170, 172.5, 175, 177.5, 180, 182.5, 185, 187.5, 190, 192.5, 195, 197.5, 200, 202.5, 205, 207.5, 210, 212.5, 215, 217.5, 220, 222.5, 225, 227.5, 230, 232.5, 235, 237.5, 240, 242.5, 245, 247.5, or 250 mg of the compound as described herein (e.g., compound (I) or a salt thereof, or compound (II)) is dissolved or suspended in a solution at a concentration of from 0.1-250 mg/mL.

[0373] In some embodiments, the compound as described herein (e.g., compound (I) or a salt thereof, or compound (II)) is dissolved or suspended in a solution at a concentration of from 5-250, 5-247.5, 5-245, 5-242.5, 5-240, 5-237.5, 5-235, 5-232.5, 5-230, 5-227.5, 5-225, 5-225.5, 5-220, 5-217.5, 5-215, 5-212.5, 5-210, 5-205.5, 5-205, 5-202.5, 5-200, 5-197.5, 5-195, 5-192.5, 5-190, 5-187.5, 5-185, 5-182.5, 5-180, 5-177.5, 5-175, 5-172.5, 5-170, 5-167.5, 5-165, 5-162.5, 5-160, 5-157.5, 5-155, 5-152.5, 5-150, 5-147.5, 5-145, 5-142.5, 5-140, 5-137.5, 5-135, 5-132.5, 5-130, 5-127.5, 5-125, 5-122.5, 5-120, 5-117.5, 5-115, 5-112.5, 5-110, 5-107.5, 5-105, 5-102.5, 5-100, 5-97.5, 5-95, 5-92.5, 5-90, 5-87.5, 5-85, 5-82.5, 5-80, 5-77.5, 5-75, 5-72.5, 5-70, 5-67.5, 5-65, 5-62.5, 5-60, 5-57.5, 5-55, 5-52.5, 5-50, 5-47.5, 5-45, 5-42.5, 5-40, 5-37.5, 5-35, 5-32.5, 5-30, 5-27.5, 5-25, 5-22.5, 5-20, 5-17.5, 5-15, 5-12.5, or 5-10 mg/mL. In some embodiments, the compound as described herein (e.g., compound (I) or a salt thereof, or compound (II)) is dissolved or suspended in a solution at a concentration of from 10-250, 15-250, 20-250, 25-250, 30-250, 35-250, 40-250, 45-250, 50-250, 55-250, 60-250, 65-250, 70-250, 75-250, 80-250, 85-250, 90-250, 95-250, 100-250, 105-250, 110-250, 115-250, 120-250, 125-250, 130-250, 135-250, 140-250, 145-250, 150-250, 155-250, 160-250, 165-250, 170-250, 175-250, 180-250, 185-250, 190-250, or 195-250, 200-250, 205-250, 210-250, 215-250, 220-250, 225-250, 230-250, 235-250, 240-250, or 245-250 mg/mL. In some embodiments, the compound as described herein (e.g., compound (I) or a salt thereof, or compound (II)) is dissolved or suspended in a solution at a concentration of from at least 1, 2, 3, 4, 5, 6, 7, 8, 9, 10, 11, 12, 13, 14, 15, 16, 17, 18, 19, 20, 21, 22, 23, 24, 25, 26, 27, 28, 29, 30, 31, 32, 33, 34, 35, 36, 37, 38, 39, 40, 41, 42, 43, 44, 45, 46, 47, 48, 49, 50, 51, 52, 53, 54, 55, 56, 57, 58, 59, 60, 61, 62, 63, 64, 65, 66, 67, 68, 69, 70, 71, 72, 73, 74, 75, 76, 77, 78, 79, 80, 81, 82, 83, 84, 85, 86, 87, 88, 89, 90, 91, 92, 93, 94, 95, 96, 97, 98, 99, 100, 101, 102, 103, 104, 105, 106, 107, 108, 109, 110, 111, 112, 113, 114, 115, 116, 117, 118, 119, 120, 121, 122, 123, 124, 125, 126, 127, 128, 129, 130, 131, 132, 133, 134, 135, 136, 137, 138, 139, 140, 141, 142, 143, 144, 145, 146, 147, 148, 149, 150, 151, 152, 153, 154, 155, 156, 157, 158, 159, 160, 161, 162, 163, 164, 165, 166, 167, 168, 169, 170, 171, 172, 173, 174, 175, 176, 177, 178, 179, 180, 181, 182, 183, 184, 185, 186, 187, 188, 189, 190, 191, 192, 193, 194, 195, 196, 197, 198, 199, 200, 210, 211, 212, 213, 214, 215, 216, 217, 218, 219, 220, 221, 222, 223, 224, 225, 226, 227, 228, 229, 230, 231, 232, 233, 234, 235, 236, 237, 238, 239, 240, 241, 242, 243, 244, 245, 246, 247, 248, 249, or 250 mg/mL. In some embodiments, the compound as described herein (e.g., compound (I) or a salt thereof, or compound (II)) is dissolved or suspended in a solution at a concentration of from at most 1, 2, 3, 4, 5, 6, 7, 8, 9, 10, 11, 12, 13, 14, 15, 16, 17, 18, 19, 20, 21, 22, 23, 24, 25, 26, 27, 28, 29, 30, 31, 32, 33, 34, 35, 36, 37, 38, 39, 40, 41, 42, 43, 44, 45, 46, 47, 48, 49, 50, 51, 52, 53, 54, 55, 56, 57, 58, 59, 60, 61, 62, 63, 64, 65, 66, 67, 68, 69, 70, 71, 72, 73, 74, 75, 76, 77, 78, 79, 80, 81, 82, 83, 84, 85, 86, 87, 88, 89, 90, 91, 92, 93, 94, 95, 96, 97, 98, 99, 100, 101, 102, 103, 104, 105, 106, 107, 108, 109, 110, 111, 112, 113, 114, 115, 116, 117, 118, 119, 120, 121, 122, 123, 124, 125, 126, 127, 128, 129, 130, 131, 132, 133, 134, 135, 136, 137, 138, 139, 140, 141, 142, 143, 144, 145, 146, 147, 148, 149, 150, 151, 152, 153, 154, 155, 156, 157, 158, 159, 160, 161, 162, 163, 164, 165, 166, 167, 168, 169, 170, 171, 172, 173, 174, 175, 176, 177, 178, 179, 180, 181, 182, 183, 184, 185, 186, 187, 188, 189, 190, 191, 192, 193, 194, 195, 196, 197, 198, 199, 200, 210, 211, 212, 213, 214, 215, 216, 217, 218, 219, 220, 221, 222, 223, 224, 225, 226, 227, 228, 229, 230, 231, 232, 233, 234, 235, 236, 237, 238, 239, 240, 241, 242, 243, 244, 245, 246, 247, 248, 249, or 250 mg/mL. In some embodiments, the compound as described herein (e.g., compound (I) or a salt thereof, or compound (II)) is dissolved or suspended in a solution at a concentration of from 1, 2, 3, 4, 5, 6, 7, 8, 9, 10, 11, 12, 13, 14, 15, 16, 17, 18, 19, 20, 21, 22, 23, 24, 25, 26, 27, 28, 29, 30, 31, 32, 33, 34, 35, 36, 37, 38, 39, 40, 41, 42, 43, 44, 45, 46, 47, 48, 49, 50, 51, 52, 53, 54, 55, 56, 57, 58, 59, 60, 61, 62, 63, 64, 65, 66, 67, 68, 69, 70, 71, 72, 73, 74, 75, 76, 77, 78, 79, 80, 81, 82, 83, 84, 85, 86, 87, 88, 89, 90, 91, 92, 93, 94, 95, 96, 97, 98, 99, 100, 101, 102, 103, 104, 105, 106, 107, 108, 109, 110, 111, 112, 113, 114, 115, 116, 117, 118, 119, 120, 121, 122, 123, 124, 125, 126, 127, 128, 129, 130, 131, 132, 133, 134, 135, 136, 137, 138, 139, 140, 141, 142, 143, 144, 145, 146, 147, 148, 149, 150, 151, 152, 153, 154, 155, 156, 157, 158, 159, 160, 161, 162, 163, 164, 165, 166, 167, 168, 169, 170, 171, 172, 173, 174, 175, 176, 177, 178, 179, 180, 181, 182, 183, 184, 185, 186, 187, 188, 189, 190, 191, 192, 193, 194, 195, 196, 197, 198, 199, 200, 210, 211, 212, 213, 214, 215, 216, 217, 218, 219, 220, 221, 222, 223, 224, 225, 226, 227, 228, 229, 230, 231, 232, 233, 234, 235, 236, 237, 238, 239, 240, 241, 242, 243, 244, 245, 246, 247, 248, 249, or 250 mg/mL.

[0374] In some embodiments, the pharmaceutically acceptable diluent comprises an artificial cerebral spinal fluid (aCSF) solution. In some embodiments, the solution comprises a cerebral spinal fluid (CSF) sample from the human subject. In some embodiments, the compound as described herein (e.g., compound (I) or a salt thereof, or compound (II)) is solubilized or diluted in an iso-tonic solution.

[0375] In some embodiments, the compound as described herein (e.g., compound (I) or a salt thereof, or compound (II)) is solubilized or diluted in a phosphate-buffered (pH 6.6-7.6) solution. In some embodiments, the compound as described herein (e.g., compound (I) or a salt thereof, or compound (II)) is solubilized or diluted in a phosphate-buffered (pH 6.0-8.0) solution. In some embodiments, the compound as described herein (e.g., compound (I) or a salt thereof, or compound (II)) is solubilized or diluted in a phosphate-buffered (pH 5.0-8.0) solution. In some embodiments, the compound as described herein (e.g., compound (I) or a salt thereof, or compound (II)) is solubilized or diluted in a phosphate-buffered solution with pH 4.5-8.5, pH 4.6-8.5, pH 4.7-8.5, pH 4.8-8.5, pH 4.9-8.5, pH5.0-8.5, pH 5.1-8.5, pH5.2-8.5, pH 5.3-8.5, pH5.4-8.5, pH 5.5-8.5, pH5.6-8.5, pH 5.7-8.5, pH 5.8-8.5, H 5.9-8.5, pH 6.0-8.5, pH 6.1-8.5, pH 6.2-8.5, pH 6.3-8.5, pH 6.4-8.5, pH 6.5-8.5, pH 6.6-8.5, pH 6.7-8.5, pH 6.8-8.5, pH 6.9-8.5, pH 7.0-8.5, pH 7.1-8.5, pH 7.2-8.5, pH 7.3-8.5, pH 7.4-8.5, pH 7.5-8.5, pH 7.6-8.5, pH 7.7-8.5, pH 7.8-8.5, pH 7.9-8.5, pH 8.0-8.5, pH 8.1-8.5, pH 8.2-8.5, pH 8.3-8.5, or pH 8.4-8.5. In some embodiments, the compound as described herein (e.g., compound (I) or a salt thereof, or compound (II)) is solubilized or diluted in a phosphate-buffered solution with pH 4.5-8.3, pH 4.5-8.2, pH 4.5-8.1, pH 4.5-8.0, pH 4.5-7.9, pH 4.5-7.8, pH 4.5-7.7, pH 4.5-7.6, pH 4.5-7.5, pH 4.5-7.4, pH 4.5-7.3, pH 4.5-7.2, pH 4.5-7.1, pH 4.5-7.0, pH 4.5-6.9, pH 4.5-6.8, pH 4.5-6.7, pH 4.5-6.6, pH 4.5-6.5, pH 4.5-6.4, pH 4.5-6.3, pH 4.5-6.2, pH 4.5-6.1, pH 4.5-6.0, pH 4.5-5.9, pH 4.5-5.8, pH 4.5-5.7, pH 4.5-5.6, pH 4.5-5.5, pH 4.5-5.4, pH 4.5-5.3, pH 4.5-5.2, pH 4.5-5.1, pH 4.5-5.0, pH 4.5-4.9, pH 4.5-4.8, pH 4.5-4.7, or pH 4.5-4.6. In some embodiments, the compound as described herein (e.g., compound (I) or a salt thereof, or compound (II)) is solubilized or diluted in a phosphate-buffered solution with pH 6.0-7.6, pH 6.1-7.6, pH 6.2-7.6, pH 6.3-7.6, pH 6.4-7.6, pH 6.5-7.6, pH 6.6-7.6, pH 6.7-7.6, pH 6.8-7.6, pH 6.9-7.6, pH 7.0-7.6, pH 7.1-7.6, pH 7.2-7.6, pH 7.3-7.6, pH 7.4-7.6, or pH 7.5-7.6. In some embodiments, the compound as described herein (e.g., compound (I) or a salt thereof, or compound (II)) is solubilized or diluted in a phosphate-buffered solution with pH 6.6-8.0, pH 6.6-7.9, pH 6.6-7.8, pH 6.6-7.7, pH 6.6-7.6, pH 6.6-7.5, pH 6.6-7.4, pH 6.6-7.3, pH 6.6-7.2, pH 6.6-7.1, pH 6.6-7.0, pH 6.6-6.9, pH 6.6-6.8, or pH 6.6-6.7. In some embodiments, the compound as described herein (e.g., compound (I) or a salt thereof, or compound (II)) is solubilized or diluted in a phosphate-buffered solution with pH 6.0-8.0, pH 6.1-8.0, pH 6.2-8.0, pH 6.3-8.0, pH 6.4-8.0, pH 6.5-8.0, pH 6.6-8.0, pH 6.7-8.0, pH 6.8-8.0, pH 6.9-8.0, pH 7.0-8.0, pH 7.1-8.0, pH 7.2-8.0, pH 7.3-8.0, pH 7.4-8.0, pH 7.5-8.0, pH 7.6-8.0, pH 7.7-8.0, pH 7.8-8.0, or pH 7.9-8.0. In some embodiments, the compound as described herein (e.g., compound (I) or a salt thereof, or compound (II)) is solubilized or diluted in a phosphate-buffered solution with pH 6.0-7.9, pH 6.0-7.8, pH 6.0-7.7, pH 6.0-7.6, pH 6.0-7.5, pH 6.0-7.4, pH 6.0-7.3, pH 6.0-7.2, pH 6.0-7.1, pH 6.0-7.0, pH 6.0-6.9, pH 6.0-6.8, pH 6.0-6.7, pH 6.0-6.6, pH 6.0-6.5, pH 6.0-6.4, pH 6.0-6.3, pH 6.0-6.2, or pH 6.0-6.1. In some embodiments, the compound as described herein (e.g., compound (I) or a salt thereof, or compound (II)) is solubilized or diluted in a phosphate-buffered solution with pH 5.7-8.5, 5.8-8.4, 5.9-8.3, 6.0-8.2, 6.1-8.1, 6.2-8.0, 6.3-7.9, 6.4-7.8, 6.5-7.7, or 6.6-7.6. In some embodiments, the compound as described herein (e.g., compound (I) or a salt thereof, or compound (II)) is solubilized or diluted in a phosphate-buffered solution with pH about 5.0, 5.1, 5.2, 5.3, 5.4, 5.5, 5.6, 5.7, 5.8, 5.9, 6.0. 6.1, 6.2, 6.3, 6.4, 6.5, 6.6, 6.7, 6.8, 6.9, 7.0, 7.1, 7.2, 7.3, 7.4, 7.5, 7.6, 7.7, 7.8, 7.9, or 8.0. In some embodiments, the compound as described herein (e.g., compound (I) or a salt thereof, or compound (II)) is solubilized or diluted in a phosphate-buffered solution with pH 5.0, 5.1, 5.2, 5.3, 5.4, 5.5, 5.6, 5.7, 5.8, 5.9, 6.0. 6.1, 6.2, 6.3, 6.4, 6.5, 6.6, 6.7, 6.8, 6.9, 7.0, 7.1, 7.2, 7.3, 7.4, 7.5, 7.6, 7.7, 7.8, 7.9, or 8.0.

[0376] In some embodiments, the compound as described herein (e.g., compound (I) or a salt thereof, or compound (II)) is solubilized or diluted in a buffer comprising 25-250 mM NaCl.

[0377] In some embodiments, the compound as described herein (e.g., compound (I) or a salt thereof, or compound (II)) is solubilized or diluted in a buffer comprising 25-250, 30-250, 35-250, 40-250, 45-250, 50-250, 55-250, 60-250, 65-250, 70-250, 75-250, 80-250, 85-250, 90-250, 95-250, 100-250, 105-250, 110-250, 115-250, 120-250, 125-250, 130-250, 135-250, 140-250, 145-250, 150-250, 155-250, 160-250, 165-250, 170-250, 175-250, 180-250, 185-250, 190-250, 195-250, 200-250, 205-250, 210-250, 215-250, 220-250, 225-250, 230-250, 235-250, 240-250, or 245-250 mM NaCl. In some embodiments, the compound as described herein (e.g., compound (I) or a salt thereof, or compound (II)) is solubilized or diluted in a buffer comprising 25-245, 25-240, 25-235, 25-230, 25-225, 25-220, 25-215, 25-210, 25-205, 25-200, 25-195, 25-190, 25-185, 25-180, 25-175, 25-170, 25-165, 25-160, 25-155, 25-150, 25-145, 25-140, 25-135, 25-130, 25-125, 25-120, 25-115, 25-110, 25-105, 25-110, 25-105, 25-100, 25-95, 25-90, 25-85, 25-80, 25-75, 25-70, 25-65, 25-60, 25-55, 25-50, 25-45, 25-40, 25-35, or 25-30 mM NaCl. In some embodiments, the compound as described herein (e.g., compound (I) or a salt thereof, or compound (II)) is solubilized or diluted in a buffer comprising 30-245, 35-240, 40-235, 45-230, 50-225, 55-220, 60-215, 65-210, 70-205, 75-200, 80-195, 85-190, 90-185, 95-180, 100-175, 105-170, 110-165, 115-160, 120-155, 125-150, 130-145 or 135-140 mM NaCl. In some embodiments, the compound as described herein (e.g., compound (I) or a salt thereof, or compound (II)) is solubilized or diluted in a buffer comprising 100-140, 101-140, 102-140, 103-140, 104-140, 105-140, 106-140, 107-140, 108-140, 109-140, 110-140, 111-140, 112-140, 113-140, 114-140, 115-140, 116-140, 117-140, 118-140, 119-140, 120-140, 121-140, 122-140, 123-140, 124-140, 125-140, 126-140, 127-140, 128-140, 129-140, 130-140, 131-140, 132-140, 133-140, 134-140, 135-140, 136-140, 137-140, 138-140, or 139-140 mM NaCl. In some embodiments, the compound as described herein (e.g., compound (I) or a salt thereof, or compound (II)) is solubilized or diluted in a buffer comprising 100-139, 100-138, 100-137, 100-136, 100-135, 100-134, 100-133, 100-132, 100-131, 100-130, 100-129, 100-128, 100-127, 100-126, 100-125, 100-124, 100-123, 100-122, 100-121, 100-120, 100-119, 100-118, 100-117, 100-116, 100-115, 100-114, 100-113, 100-112, 100-111, 100-110, 100-109, 100-108, 100-107, 100-106, 100-105, 100-104, 100-103, 100-102, or 100-101 mM NaCl. In some embodiments, the compound as described herein (e.g., compound (I) or a salt thereof, or compound (II)) is solubilized or diluted in a buffer comprising at least 90, 91, 92, 93, 94, 95, 96, 97, 98, 99, 100, 101, 102, 103, 104, 105, 106, 107, 108, 109, 110, 111, 112, 113, 114, 115, 116, 118, 119, 120, 121, 122, 123, 124, 125, 126, 127, 128, 129, 130, 131, 132, 133, 134, 135, 136, 137, 138, 139, or 140 mM NaCl. In some embodiments, the compound as described herein (e.g., compound (I) or a salt thereof, or compound (II)) is solubilized or diluted in a buffer comprising at most 90, 91, 92, 93, 94, 95, 96, 97, 98, 99, 100, 101, 102, 103, 104, 105, 106, 107, 108, 109, 110, 111, 112, 113, 114, 115, 116, 118, 119, 120, 121, 122, 123, 124, 125, 126, 127, 128, 129, 130, 131, 132, 133, 134, 135, 136, 137, 138, 139, or 140 mM NaCl. In some embodiments, the compound as described herein (e.g., compound (I) or a salt thereof, or compound (II)) is solubilized or diluted in a buffer comprising 90, 91, 92, 93, 94, 95, 96, 97, 98, 99, 100, 101, 102, 103, 104, 105, 106, 107, 108, 109, 110, 111, 112, 113, 114, 115, 116, 118, 119, 120, 121, 122, 123, 124, 125, 126, 127, 128, 129, 130, 131, 132, 133, 134, 135, 136, 137, 138, 139, or 140 mM NaCl.

[0378] In some embodiments, the compound as described herein (e.g., compound (I) or a salt thereof, or compound (II)) is solubilized or diluted in a buffer comprising 0.1-20 mM KCl.

[0379] In some embodiments, the compound as described herein (e.g., compound (I) or a salt thereof, or compound (II)) is solubilized or diluted in a buffer comprising 0.1-40, 0.1-39, 0.1-38, 0.1-37, 0.1-36, 0.1-35, 0.1-34, 0.1-33, 0.1-32, 0.1-31, 0.1-30, 0.1-29, 0.1-28, 0.1-27, 0.1-26, 0.1-25, 0.1-24, 0.1-23, 0.1-22, 0.1-21, 0.1-20, 0.1-19, 0.1-18, 0.1-17, 0.1-16, 0.1-15, 0.1-14, 0.1-13, 0.1-12, 0.1-10, 0.1-9, 0.1-8, 0.1-7, 0.1-6, 0.1-5, 0.1-4, 0.1-3, 0.1-2, or 0.1-1 mM KCl. In some embodiments, the compound as described herein (e.g., compound (I) or a salt thereof, or compound (II)) is solubilized or diluted in a buffer comprising 0.2-40, 0.3-40, 0.4-40, 0.5-40, 0.6-40, 0.7-40, 0.8-40, 0.9-40, 1-40, 2-40, 3-40, 4-40, 5-40, 6-40, 7-40, 8-40, 9-40, 10-40, 11-40, 12-40, 13-40, 14-40, 15-40, 16-40, 17-40, 18-40, 19-40, 20-40, 21-40, 22-40, 23-40, 24-40, 25-40, 26-40, 27-40, 28-40, 29-40, 30-40, 31-40, 32-40, 33-40, 34-40, 35-40, 36-40, 37-40, 38-40, or 39-40 mM KCl. In some embodiments, the compound as described herein (e.g., compound (I) or a salt thereof, or compound (II)) is solubilized or diluted in a buffer comprising 0.1-3.5, 0.2-3.5, 0.3-3.5, 0.4-3.5, 0.5-3.5, 0.6-3.5, 0.7-3.5, 0.8-3.5, 0.9-3.5, 1.0-3.5, 1.1-3.5, 1.2-3.5, 1.3-3.5, 1.4-3.5, 1.5-3.5, 1.6-3.5, 1.7-3.5, 1.8-3.5, 1.9-3.5, 2.0-3.5, 2.1-3.5, 2.2-3.5, 2.3-3.5, 2.4-3.5, 2.5-3.5, 2.6-3.5, 2.7-3.5, 2.8-3.5, 2.9-3.5, 3.0-3.5, 3.1-3.5, 3.2-3.5, 3.3-3.5, or 3.4-3.5 mM KCl. In some embodiments, the compound as described herein (e.g., compound (I) or a salt thereof, or compound (II)) is solubilized or diluted in a buffer comprising 0.1-3.4, 0.1-3.3, 0.1-3.2, 0.1-3.1, 0.1-3.0, 0.1-2.9, 0.1-2.8, 0.1-2.7, 0.1-2.6, 0.1-2.5, 0.1-2.4, 0.1-2.3, 0.1-2.2, 0.1-2.1, 0.1-2.0, 0.1-1.9, 0.1-1.8, 0.1-1.7, 0.1-1.6, 0.1-1.5, 0.1-1.4, 0.1-1.3, 0.1-1.2, 0.1-1.1, 0.1-1.0, 0.1-0.9, 0.1-0.8, 0.1-0.7, 0.1-0.6, 0.1-0.5, 0.1-0.4, 0.1-0.3, or 0.1-0.2 mM KCl. In some embodiments, the compound as described herein (e.g., compound (I) or a salt thereof, or compound (II)) is solubilized or diluted in a buffer comprising at least 0.1, 0.2, 0.3, 0.4, 0.5, 0.6, 0.7, 0.8, 0.9, 1.0, 1.1, 1.2, 1.3, 1.4, 1.5, 1.6, 1.7, 1.8, 1.9, 2.0, 2.1, 2.2, 2.3, 2.4, 2.5, 2.6, 2.7, 2.8, 2.9, 3.0, 3.1, 3.2, 3.3, 3.4, or 3.5 mM KCl. In some embodiments, the compound as described herein (e.g., compound (I) or a salt thereof, or compound (II)) is solubilized or diluted in a buffer comprising at most 0.1, 0.2, 0.3, 0.4, 0.5, 0.6, 0.7, 0.8, 0.9, 1.0, 1.1, 1.2, 1.3, 1.4, 1.5, 1.6, 1.7, 1.8, 1.9, 2.0, 2.1, 2.2, 2.3, 2.4, 2.5, 2.6, 2.7, 2.8, 2.9, 3.0, 3.1, 3.2, 3.3, 3.4, or 3.5 mM KCl. In some embodiments, the compound as described herein (e.g., compound (I) or a salt thereof, or compound (II)) is solubilized or diluted in a buffer comprising 0.1, 0.2, 0.3, 0.4, 0.5, 0.6, 0.7, 0.8, 0.9, 1.0, 1.1, 1.2, 1.3, 1.4, 1.5, 1.6, 1.7, 1.8, 1.9, 2.0, 2.1, 2.2, 2.3, 2.4, 2.5, 2.6, 2.7, 2.8, 2.9, 3.0, 3.1, 3.2, 3.3, 3.4, or 3.5 mM KCl.

[0380] In some embodiments, the compound as described herein (e.g., compound (I) or a salt thereof, or compound (II)) is solubilized or diluted in a buffer comprising 0.1-50 mM Na₂HPO₄.

[0381] In some embodiments, the compound as described herein (e.g., compound (I) or a salt thereof, or compound (II)) is solubilized or diluted in a buffer comprising 0.01-100, 0.02-100, 0.03-100, 0.04-100, 0.05-100, 0.06-100, 0.07-100, 0.08-100, 0.09-100, 0.1-100, 0.2-100, 0.3-100, 0.4-100, 0.5-100, 0.6-100, 0.7-100, 0.8-100, 0.9-100, 1-100, 2-100, 3-100, 4-100, 5-100, 6-100, 7-100, 8-100, 9-100, 10-100, 15-100, 20-100, 25-100, 30-100, 35-100, 40-100, 45-100, 50-100, 55-100, 60-100, 65-100, 70-100, 75-100, 80-100, 85-100, 90-100, or 95-100 mM Na₂HPO₄. In some embodiments, the compound as described herein (e.g., compound (I) or a salt thereof, or compound (II)) is solubilized or diluted in a buffer comprising 0.01-95, 0.01-90, 0.01-85, 0.01-80, 0.01-75, 0.01-70, 0.01-65, 0.01-60, 0.01-55, 0.01-50, 0.01-45, 0.01-40, 0.01-35, 0.01-30, 0.01-25, 0.01-20, 0.01-15, 0.01-10, 0.01-9, 0.01-8, 0.01-7, 0.01-6, 0.01-5, 0.01-4, 0.01-3, 0.01-2, 0.01-1, 0.01-0.9, 0.01-0.8, 0.01-0.7, 0.01-0.6, 0.01-0.5, 0.01-0.4, 0.01-0.3, 0.01-0.2, 0.01-0.1, 0.01-0.09, 0.01-0.08, 0.01-0.07, 0.01-0.06, 0.01-0.05, 0.01-0.04, 0.01-0.03, or 0.01-0.02 mM Na₂HPO₄. In some embodiments, the compound as described herein (e.g., compound (I) or a salt thereof, or compound (II)) is solubilized or diluted in a buffer comprising 0.1-3.0, 0.1-2.9, 0.1-2.8, 0.1-2.7, 0.1-2.6, 0.1-2.5, 0.1-2.4, 0.1-2.3, 0.1-2.2, 0.1-2.1, 0.1-2.0, 0.1-1.9, 0.1-1.8, 0.1-1.7, 0.1-1.6, 0.1-1.5, 0.1-1.4, 0.1-1.3, 0.1-1.2, 0.1-1.1, 0.1-1.0, 0.1-0.9, 0.1-0.8, 0.1-0.7, 0.1-0.6, 0.1-0.5, 0.1-0.4, 0.1-0.3, or 0.1-0.2 mM Na₂HPO₄. In some embodiments, the compound as described herein (e.g., compound (I) or a salt thereof, or compound (II)) is solubilized or diluted in a buffer comprising 0.1-3.0, 0.2-3.0, 0.3-3.0, 0.4-3.0, 0.5-3.0, 0.6-3.0, 0.7-3.0, 0.8-3.0, 0.9-3.0, 1.0-3.0, 1.2-3.0, 1.3-3.0, 1.4-3.0, 1.5-3.0, 1.6-3.0, 1.7-3.0, 1.8-3.0, 1.9-3.0, 2.0-3.0, 2.1-3.0, 2.2-3.0, 2.3-3.0, 2.4-3.0, 2.5-3.0, 2.6-3.0, 2.7-3.0, 2.8-3.0, or 2.9-3.0 mM Na₂HPO₄. In some embodiments, the compound as described herein (e.g., compound (I) or a salt thereof, or compound (II)) is solubilized or diluted in a buffer comprising at least 0.1, 0.2, 0.3, 0.4, 0.5, 0.6, 0.7, 0.8, 0.9, 1.0, 1.1, 1.2, 1.3, 1.4, 1.5, 1.6, 1.7, 1.8, 1.9, 2.0, 2.1, 2.2, 2.3, 2.4, 2.5, 2.6, 2.7, 2.8, 2.9, or 3.0 mM Na₂HPO₄. In some embodiments, the compound as described herein (e.g., compound (I) or a salt thereof, or compound (II)) is solubilized or diluted in a buffer comprising at most 0.1, 0.2, 0.3, 0.4, 0.5, 0.6, 0.7, 0.8, 0.9, 1.0, 1.1, 1.2, 1.3, 1.4, 1.5, 1.6, 1.7, 1.8, 1.9, 2.0, 2.1, 2.2, 2.3, 2.4, 2.5, 2.6, 2.7, 2.8, 2.9, or 3.0 mM Na₂HPO₄. In some embodiments, the compound as described herein (e.g., compound (I) or a salt thereof, or compound (II)) is solubilized or diluted in a buffer comprising 0.1, 0.2, 0.3, 0.4, 0.5, 0.6, 0.7, 0.8, 0.9, 1.0, 1.1, 1.2, 1.3, 1.4, 1.5, 1.6, 1.7, 1.8, 1.9, 2.0, 2.1, 2.2, 2.3, 2.4, 2.5, 2.6, 2.7, 2.8, 2.9, or 3.0 mM Na₂HPO₄.

[0382] In some embodiments, the compound as described herein (e.g., compound (I) or a salt thereof, or compound (II)) is solubilized or diluted in a buffer comprising 0.1-50 mM NaH₂PO₄.

[0383] In some embodiments, the compound as described herein (e.g., compound (I) or a salt thereof, or compound (II)) is solubilized or diluted in a buffer comprising 0.01-100, 0.02-100, 0.03-100, 0.04-100, 0.05-100, 0.06-100, 0.07-100, 0.08-100, 0.09-100, 0.1-100, 0.2-100, 0.3-100, 0.4-100, 0.5-100, 0.6-100, 0.7-100, 0.8-100, 0.9-100, 1-100, 2-100, 3-100, 4-100, 5-100, 6-100, 7-100, 8-100, 9-100, 10-100, 15-100, 20-100, 25-100, 30-100, 35-100, 40-100, 45-100, 50-100, 55-100, 60-100, 65-100, 70-100, 75-100, 80-100, 85-100, 90-100, or 95-100 mM NaH₂PO₄. In some embodiments, the compound as described herein (e.g., compound (I) or a salt thereof, or compound (II)) is solubilized or diluted in a buffer comprising 0.01-95, 0.01-90, 0.01-85, 0.01-80, 0.01-75, 0.01-70, 0.01-65, 0.01-60, 0.01-55, 0.01-50, 0.01-45, 0.01-40, 0.01-35, 0.01-30, 0.01-25, 0.01-20, 0.01-15, 0.01-10, 0.01-9, 0.01-8, 0.01-7, 0.01-6, 0.01-5, 0.01-4, 0.01-3, 0.01-2, 0.01-1, 0.01-0.9, 0.01-0.8, 0.01-0.7, 0.01-0.6, 0.01-0.5, 0.01-0.4, 0.01-0.3, 0.01-0.2, 0.01-0.1, 0.01-0.09, 0.01-0.08, 0.01-0.07, 0.01-0.06, 0.01-0.05, 0.01-0.04, 0.01-0.03, or 0.01-0.02 mM NaH₂PO₄. In some embodiments, the compound as described herein (e.g., compound (I) or a salt thereof, or compound (II)) is solubilized or diluted in a buffer comprising 0.1-3.0, 0.1-2.9, 0.1-2.8, 0.1-2.7, 0.1-2.6, 0.1-2.5, 0.1-2.4, 0.1-2.3, 0.1-2.2, 0.1-2.1, 0.1-2.0, 0.1-1.9, 0.1-1.8, 0.1-1.7, 0.1-1.6, 0.1-1.5, 0.1-1.4, 0.1-1.3, 0.1-1.2, 0.1-1.1, 0.1-1.0, 0.1-0.9, 0.1-0.8, 0.1-0.7, 0.1-0.6, 0.1-0.5, 0.1-0.4, 0.1-0.3, or 0.1-0.2 mM NaH₂PO₄. In some embodiments, the compound as described herein (e.g., compound (I) or a salt thereof, or compound (II)) is solubilized or diluted in a buffer comprising 0.1-3.0, 0.2-3.0, 0.3-3.0, 0.4-3.0, 0.5-3.0, 0.6-3.0, 0.7-3.0, 0.8-3.0, 0.9-3.0, 1.0-3.0, 1.2-3.0, 1.3-3.0, 1.4-3.0, 1.5-3.0, 1.6-3.0, 1.7-3.0, 1.8-3.0, 1.9-3.0, 2.0-3.0, 2.1-3.0, 2.2-3.0, 2.3-3.0, 2.4-3.0, 2.5-3.0, 2.6-3.0, 2.7-3.0, 2.8-3.0, or 2.9-3.0 mM NaH₂PO₄. In some embodiments, the compound as described herein (e.g., compound (I) or a salt thereof, or compound (II)) is solubilized or diluted in a buffer comprising at least 0.1, 0.2, 0.3, 0.4, 0.5, 0.6, 0.7, 0.8, 0.9, 1.0, 1.1, 1.2, 1.3, 1.4, 1.5, 1.6, 1.7, 1.8, 1.9, 2.0, 2.1, 2.2, 2.3, 2.4, 2.5, 2.6, 2.7, 2.8, 2.9, or 3.0 mM NaH₂PO₄. In some embodiments, the compound as described herein (e.g., compound (I) or a salt thereof, or compound (II)) is solubilized or diluted in a buffer comprising at most 0.1, 0.2, 0.3, 0.4, 0.5, 0.6, 0.7, 0.8, 0.9, 1.0, 1.1, 1.2, 1.3, 1.4, 1.5, 1.6, 1.7, 1.8, 1.9, 2.0, 2.1, 2.2, 2.3, 2.4, 2.5, 2.6, 2.7, 2.8, 2.9, or 3.0 mM NaH₂PO₄. In some embodiments, the compound as described herein (e.g., compound (I) or a salt thereof, or compound (II)) is solubilized or diluted in a buffer comprising 0.1, 0.2, 0.3, 0.4, 0.5, 0.6, 0.7, 0.8, 0.9, 1.0, 1.1, 1.2, 1.3, 1.4, 1.5, 1.6, 1.7, 1.8, 1.9, 2.0, 2.1, 2.2, 2.3, 2.4, 2.5, 2.6, 2.7, 2.8, 2.9, or 3.0 mM NaH₂PO₄.

[0384] In some embodiments, the compound as described herein (e.g., compound (I) or a salt thereof, or compound (II)) is solubilized or diluted in a buffer comprising 0.1-50 mM CaCl₂.

[0385] In some embodiments, the compound as described herein (e.g., compound (I) or a salt thereof, or compound (II)) is solubilized or diluted in a buffer comprising 0.1-50, 0.2-50, 0.3-50, 0.4-50, 0.5-50, 0.6-50, 0.7-50, 0.8-50, 0.9-50, 1.0-50, −50, 1.1-50, 1.2-50, 1.3-50, 1.4-50, 1.5-50, 1.6-50, 1.7-50, 1.8-50, 1.9-50, 2.0-50, 2.1-50, 2.2-50, 2.3-50, 2.4-50, 2.5-50, 2.6-50, 2.7-50, 2.8-50, 2.9-50, 3.0-50, 3.1-50, 3.2-50, 3.3-50, 3.4-50, 3.5-50, 3.6-50, 3.7-50, 3.8-50, 3.9-50, 4-50, 5-50, 6-50, 7-50, 8-50, 9-50, 10-50, 15-50, 20-50, 25-50, 1 30-50, 35-50, 40-50, or 45-50 mM CaCl₂. In some embodiments, the compound as described herein (e.g., compound (I) or a salt thereof, or compound (II)) is solubilized or diluted in a buffer comprising 0.1-45, 0.1-40, 0.1-35, 0.1-30, 0.1-25, 0.1-20, 0.1-15, 0.1-10, 0.1-5, 0.1-4, 0.1-4.9, 0.1-4.8, 0.1-4.7, 0.1-4.6, 0.1-4.5, 0.1-4.4, 0.1-4.3, 0.1-4.2, 0.1-4.1, 0.1-4.0, 0.1-3.9, 0.1-3.8, 0.1-3.7, 0.1-3.6, 0.1-3.5, 0.1-3.4, 0.1-3.3, 0.1-3.2, 0.1-3.1, 0.1-3.0, 0.1-2.9, 0.1-2.8, 0.1-2.7, 0.1-2.6, 0.1-2.5, 0.1-2.4, 0.1-2.3, 0.1-2.2, 0.1-2.1, 0.1-2.0, 0.1-1.9, 0.1-1.8, 0.1-1.7, 0.1-1.6, 0.1-1.5, 0.1-1.4, 0.1-1.3, 0.1-1.2, 0.1-1.1, 0.1-1.0, 0.1-0.9, 0.1-0.8, 0.1-0.7, 0.1-0.6, 0.1-0.5, 0.1-0.4, 0.1-0.3, or 0.1-0.2 mM CaCl₂. In some embodiments, the compound as described herein (e.g., compound (I) or a salt thereof, or compound (II)) is solubilized or diluted in a buffer comprising at least 1.0, 1.1, 1.2, 1.3, 1.4, 1.5, 1.6, 1.7, 1.8, 1.9, 2.0, 2.1, 2.2, 2.3, 2.4, 2.5, 2.6, 2.7, 2.8, 2.9, 3.0, 3.1, 3.2, 3.3, 3.4, 3.5, 3.6, 3.7, 3.8, 3.9, or 4.0 mM CaCl₂. In some embodiments, the compound as described herein (e.g., compound (I) or a salt thereof, or compound (II)) is solubilized or diluted in a buffer comprising at most 1.0, 1.1, 1.2, 1.3, 1.4, 1.5, 1.6, 1.7, 1.8, 1.9, 2.0, 2.1, 2.2, 2.3, 2.4, 2.5, 2.6, 2.7, 2.8, 2.9, 3.0, 3.1, 3.2, 3.3, 3.4, 3.5, 3.6, 3.7, 3.8, 3.9, or 4.0 mM CaCl₂. In some embodiments, the compound as described herein (e.g., compound (I) or a salt thereof, or compound (II)) is solubilized or diluted in a buffer comprising 1.0, 1.1, 1.2, 1.3, 1.4, 1.5, 1.6, 1.7, 1.8, 1.9, 2.0, 2.1, 2.2, 2.3, 2.4, 2.5, 2.6, 2.7, 2.8, 2.9, 3.0, 3.1, 3.2, 3.3, 3.4, 3.5, 3.6, 3.7, 3.8, 3.9, or 4.0 mM CaCl₂.

[0386] In some embodiments, the compound as described herein (e.g., compound (I) or a salt thereof, or compound (II)) is solubilized or diluted in a buffer comprising 0.1-50 mM MgCl₂.

[0387] In some embodiments, the compound as described herein (e.g., compound (I) or a salt thereof, or compound (II)) is solubilized or diluted in a buffer comprising 0.1-50, 0.2-50, 0.3-50, 0.4-50, 0.5-50, 0.6-50, 0.7-50, 0.8-50, 0.9-50, 1.0-50, −50, 1.1-50, 1.2-50, 1.3-50, 1.4-50, 1.5-50, 1.6-50, 1.7-50, 1.8-50, 1.9-50, 2.0-50, 2.1-50, 2.2-50, 2.3-50, 2.4-50, 2.5-50, 2.6-50, 2.7-50, 2.8-50, 2.9-50, 3.0-50, 3.1-50, 3.2-50, 3.3-50, 3.4-50, 3.5-50, 3.6-50, 3.7-50, 3.8-50, 3.9-50, 4-50, 5-50, 6-50, 7-50, 8-50, 9-50, 10-50, 15-50, 20-50, 25-50, 1 30-50, 35-50, 40-50, or 45-50 mM MgCl₂. In some embodiments, the compound as described herein (e.g., compound (I) or a salt thereof, or compound (II)) is solubilized or diluted in a buffer comprising 0.1-45, 0.1-40, 0.1-35, 0.1-30, 0.1-25, 0.1-20, 0.1-15, 0.1-10, 0.1-5, 0.1-4, 0.1-4.9, 0.1-4.8, 0.1-4.7, 0.1-4.6, 0.1-4.5, 0.1-4.4, 0.1-4.3, 0.1-4.2, 0.1-4.1, 0.1-4.0, 0.1-3.9, 0.1-3.8, 0.1-3.7, 0.1-3.6, 0.1-3.5, 0.1-3.4, 0.1-3.3, 0.1-3.2, 0.1-3.1, 0.1-3.0, 0.1-2.9, 0.1-2.8, 0.1-2.7, 0.1-2.6, 0.1-2.5, 0.1-2.4, 0.1-2.3, 0.1-2.2, 0.1-2.1, 0.1-2.0, 0.1-1.9, 0.1-1.8, 0.1-1.7, 0.1-1.6, 0.1-1.5, 0.1-1.4, 0.1-1.3, 0.1-1.2, 0.1-1.1, 0.1-1.0, 0.1-0.9, 0.1-0.8, 0.1-0.7, 0.1-0.6, 0.1-0.5, 0.1-0.4, 0.1-0.3, or 0.1-0.2 mM MgCl₂. In some embodiments, the compound as described herein (e.g., compound (I) or a salt thereof, or compound (II)) is solubilized or diluted in a buffer comprising at least 0.1, 0.2, 0.3, 0.4, 0.5, 0.6, 0.7, 0.8, 0.9, 1.0, 1.1, 1.2, 1.3, 1.4, 1.5, 1.6, 1.7, 1.8, 1.9, 2.0, 2.1, 2.2, 2.3, 2.4, 2.5, 2.6, 2.7, 2.8, 2.9, 3.0, 3.1, 3.2, 3.3, 3.4, 3.5, 3.6, 3.7, 3.8, 3.9, or 4.0 mM MgCl₂. In some embodiments, the compound as described herein (e.g., compound (I) or a salt thereof, or compound (II)) is solubilized or diluted in a buffer comprising at most 0.1, 0.2, 0.3, 0.4, 0.5, 0.6, 0.7, 0.8, 0.9, 1.0, 1.1, 1.2, 1.3, 1.4, 1.5, 1.6, 1.7, 1.8, 1.9, 2.0, 2.1, 2.2, 2.3, 2.4, 2.5, 2.6, 2.7, 2.8, 2.9, 3.0, 3.1, 3.2, 3.3, 3.4, 3.5, 3.6, 3.7, 3.8, 3.9, or 4.0 mM MgCl₂. In some embodiments, the compound as described herein (e.g., compound (I) or a salt thereof, or compound (II)) is solubilized or diluted in a buffer comprising 0.1, 0.2, 0.3, 0.4, 0.5, 0.6, 0.7, 0.8, 0.9, 1.0, 1.1, 1.2, 1.3, 1.4, 1.5, 1.6, 1.7, 1.8, 1.9, 2.0, 2.1, 2.2, 2.3, 2.4, 2.5, 2.6, 2.7, 2.8, 2.9, 3.0, 3.1, 3.2, 3.3, 3.4, 3.5, 3.6, 3.7, 3.8, 3.9, or 4.0 mM MgCl₂.

[0388] In some embodiments, the compound as described herein (e.g., compound (I) or a salt thereof, or compound (II)) is solubilized or diluted in a buffer further comprising 1-100 mM NaHCO₃, 1-100 mM KHCO₃, or a combination thereof.

[0389] In some embodiments, the compound as described herein (e.g., compound (I) or a salt thereof, or compound (II)) is solubilized or diluted in a buffer comprising 1-100 mM NaHCO₃.

[0390] In some embodiments, the compound as described herein (e.g., compound (I) or a salt thereof, or compound (II)) is solubilized or diluted in a buffer comprising 1-99, 1-95, 1-90, 1-85, 1-80, 1-75, 1-70, 1-65, 1-60, 1-55, 1-50, 1-45, 1-40, 1-35, 1-30, 1-25, 1-20, 1-15, 1-10, 1-9, 1-8, 1-7, 1-6, 1-5, 1-4, 1-3, or 1-2 mM NaHCO₃. In some embodiments, the compound as described herein (e.g., compound (I) or a salt thereof, or compound (II)) is solubilized or diluted in a buffer comprising 2-100, 3-100, 4-100, 5-100, 6-100, 7-100, 8-100, 9-100, 10-100, 15-100, 20-100, 25-100, 30-100, 35-100, 40-100, 45-100, 50-100, 55-100, 60-100, 65-100, 70-100, 75-100, 80-100, 85-100, 90-100, or 95-100 mM NaHCO₃. In some embodiments, the compound as described herein (e.g., compound (I) or a salt thereof, or compound (II)) is solubilized or diluted in a buffer comprising 24.0-28.0, 24.0-27.9, 24.0-27.8, 24.0-27.7, 24.0-27.6, 24.0-27.5, 24.0-27.4, 24.0-27.3, 24.0-27.2, 24.0-27.1, 24.0-27.0, 24.0-26.9, 24.0-26.8, 24.0-26.7, 24.0-26.6, 24.0-26.5, 24.0-26.4, 24.0-26.3, 24.0-26.2, 24.0-26.1, 24.0-26.0, 24.0-25.9, 4.0-25.8, 24.0-25.7, 24.0-25.6, 24.0-25.5, 24.0-25.4, 24.0-25.3, 24.0-25.2, 24.0-25.1, 24.0-25.0, 24.0-24.9, 24.0-24.8, 24.0-24.7, 24.0-24.6, 24.0-24.5, 24.0-24.4, 24.0-24.3, 24.0-24.2, or 24.0-24.1 mM NaHCO₃. In some embodiments, the compound as described herein (e.g., compound (I) or a salt thereof, or compound (II)) is solubilized or diluted in a buffer comprising 24.1-28.0, 24.2-28.0, 24.3-28.0, 24.4-28.0, 24.5-28.0, 24.6-28.0, 24.7-28.0, 24.8-28.0, 24.9-28.0, 25.0-28.0, 25.1-28.0, 25.2-28.0, 25.3-28.0, 25.4-28.0, 25.5-28.0, 25.6-28.0, 25.7-28.0, 25.8-28.0, 25.9-28.0, 26.0-28.0, 26.1-28.0, 26.2-28.0, 26.3-28.0, 26.4-28.0, 26.5-28.0, 26.6-28.0, 26.7-28.0, 26.8-28.0, 26.9-28.0, 27.0-28.0, 27.1-28.0, 27.2-28.0, 27.3-28.0, 27.4-28.0, 27.5-28.0, 27.6-28.0, 27.7-28.0, 27.8-28.0, or 27.9-28.0 mM NaHCO₃. In some embodiments, the compound as described herein (e.g., compound (I) or a salt thereof, or compound (II)) is solubilized or diluted in a buffer comprising at least 24.0, 24.1, 24.2, 24.3, 24.4, 24.5, 24.6, 24.7, 24.8, 24.9, 25.0, 25.1, 25.2, 25.3, 25.4, 25.5, 25.6, 25.7, 25.8, 25.9, 26.0, 26.1, 26.2, 26.3, 26.4, 26.5, 26.6, 26.7, 26.8, 26.9, 27.0, 27.1, 27.2, 27.3, 27.4, 27.5, 27.6, 27.7, 27.8, 27.9, or 28.0 mM NaHCO₃. In some embodiments, the compound as described herein (e.g., compound (I) or a salt thereof, or compound (II)) is solubilized or diluted in a buffer comprising at most 24.0, 24.1, 24.2, 24.3, 24.4, 24.5, 24.6, 24.7, 24.8, 24.9, 25.0, 25.1, 25.2, 25.3, 25.4, 25.5, 25.6, 25.7, 25.8, 25.9, 26.1, 26.2, 26.3, 26.4, 26.5, 26.6, 26.7, 26.8, 26.9, 27.0, 27.1, 27.2, 27.3, 27.4, 27.5, 27.6, 27.7, 27.8, 27.9, or 28.0 mM NaHCO₃. In some embodiments, the compound as described herein (e.g., compound (I) or a salt thereof, or compound (II)) is solubilized or diluted in a buffer comprising 24.0, 24.1, 24.2, 24.3, 24.4, 24.5, 24.6, 24.7, 24.8, 24.9, 25.0, 25.1, 25.2, 25.3, 25.4, 25.5, 25.6, 25.7, 25.8, 25.9, 26.1, 26.2, 26.3, 26.4, 26.5, 26.6, 26.7, 26.8, 26.9, 27.0, 27.1, 27.2, 27.3, 27.4, 27.5, 27.6, 27.7, 27.8, 27.9, or 28.0 mM NaHCO₃.

[0391] In some embodiments, the compound as described herein (e.g., compound (I) or a salt thereof, or compound (II)) is solubilized or diluted in a buffer comprising 1-100 mM KHCO₃.

[0392] In some embodiments, the compound as described herein (e.g., compound (I) or a salt thereof, or compound (II)) is solubilized or diluted in a buffer comprising 1-99, 1-95, 1-90, 1-85, 1-80, 1-75, 1-70, 1-65, 1-60, 1-55, 1-50, 1-45, 1-40, 1-35, 1-30, 1-25, 1-20, 1-15, 1-10, 1-9, 1-8, 1-7, 1-6, 1-5, 1-4, 1-3, or 1-2 mM KHCO₃. In some embodiments, the compound as described herein (e.g., compound (I) or a salt thereof, or compound (II)) is solubilized or diluted in a buffer comprising 2-100, 3-100, 4-100, 5-100, 6-100, 7-100, 8-100, 9-100, 10-100, 15-100, 20-100, 25-100, 30-100, 35-100, 40-100, 45-100, 50-100, 55-100, 60-100, 65-100, 70-100, 75-100, 80-100, 85-100, 90-100, or 95-100 mM KHCO₃. In some embodiments, the compound as described herein (e.g., compound (I) or a salt thereof, or compound (II)) is solubilized or diluted in a buffer comprising 24.0-28.0, 24.0-27.9, 24.0-27.8, 24.0-27.7, 24.0-27.6, 24.0-27.5, 24.0-27.4, 24.0-27.3, 24.0-27.2, 24.0-27.1, 24.0-27.0, 24.0-26.9, 24.0-26.8, 24.0-26.7, 24.0-26.6, 24.0-26.5, 24.0-26.4, 24.0-26.3, 24.0-26.2, 24.0-26.1, 24.0-26.0, 24.0-25.9, 4.0-25.8, 24.0-25.7, 24.0-25.6, 24.0-25.5, 24.0-25.4, 24.0-25.3, 24.0-25.2, 24.0-25.1, 24.0-25.0, 24.0-24.9, 24.0-24.8, 24.0-24.7, 24.0-24.6, 24.0-24.5, 24.0-24.4, 24.0-24.3, 24.0-24.2, or 24.0-24.1 mM KHCO₃. In some embodiments, the compound as described herein (e.g., compound (I) or a salt thereof, or compound (II)) is solubilized or diluted in a buffer comprising 24.1-28.0, 24.2-28.0, 24.3-28.0, 24.4-28.0, 24.5-28.0, 24.6-28.0, 24.7-28.0, 24.8-28.0, 24.9-28.0, 25.0-28.0, 25.1-28.0, 25.2-28.0, 25.3-28.0, 25.4-28.0, 25.5-28.0, 25.6-28.0, 25.7-28.0, 25.8-28.0, 25.9-28.0, 26.0-28.0, 26.1-28.0, 26.2-28.0, 26.3-28.0, 26.4-28.0, 26.5-28.0, 26.6-28.0, 26.7-28.0, 26.8-28.0, 26.9-28.0, 27.0-28.0, 27.1-28.0, 27.2-28.0, 27.3-28.0, 27.4-28.0, 27.5-28.0, 27.6-28.0, 27.7-28.0, 27.8-28.0, or 27.9-28.0 mM KHCO₃. In some embodiments, the compound as described herein (e.g., compound (I) or a salt thereof, or compound (II)) is solubilized or diluted in a buffer comprising at least 24.0, 24.1, 24.2, 24.3, 24.4, 24.5, 24.6, 24.7, 24.8, 24.9, 25.0, 25.1, 25.2, 25.3, 25.4, 25.5, 25.6, 25.7, 25.8, 25.9, 26.0, 26.1, 26.2, 26.3, 26.4, 26.5, 26.6, 26.7, 26.8, 26.9, 27.0, 27.1, 27.2, 27.3, 27.4, 27.5, 27.6, 27.7, 27.8, 27.9, or 28.0 mM KHCO₃. In some embodiments, the compound as described herein (e.g., compound (I) or a salt thereof, or compound (II)) is solubilized or diluted in a buffer comprising at most 24.0, 24.1, 24.2, 24.3, 24.4, 24.5, 24.6, 24.7, 24.8, 24.9, 25.0, 25.1, 25.2, 25.3, 25.4, 25.5, 25.6, 25.7, 25.8, 25.9, 26.1, 26.2, 26.3, 26.4, 26.5, 26.6, 26.7, 26.8, 26.9, 27.0, 27.1, 27.2, 27.3, 27.4, 27.5, 27.6, 27.7, 27.8, 27.9, or 28.0 mM KHCO₃. In some embodiments, the compound as described herein (e.g., compound (I) or a salt thereof, or compound (II)) is solubilized or diluted in a buffer comprising 24.0, 24.1, 24.2, 24.3, 24.4, 24.5, 24.6, 24.7, 24.8, 24.9, 25.0, 25.1, 25.2, 25.3, 25.4, 25.5, 25.6, 25.7, 25.8, 25.9, 26.1, 26.2, 26.3, 26.4, 26.5, 26.6, 26.7, 26.8, 26.9, 27.0, 27.1, 27.2, 27.3, 27.4, 27.5, 27.6, 27.7, 27.8, 27.9, or 28.0 mM KHCO₃.

[0393] In some embodiments, the compound as described herein (e.g., compound (I) or a salt thereof, or compound (II)) is solubilized or diluted in a buffer comprising 0-50 mM KH₂PO₄.

[0394] In some embodiments, the compound as described herein (e.g., compound (I) or a salt thereof, or compound (II)) is solubilized or diluted in a buffer comprising 0-100, 0.01-100, 0.02-100, 0.03-100, 0.04-100, 0.05-100, 0.06-100, 0.07-100, 0.08-100, 0.09-100, 0.1-100, 0.2-100, 0.3-100, 0.4-100, 0.5-100, 0.6-100, 0.7-100, 0.8-100, 0.9-100, 1-100, 2-100, 3-100, 4-100, 5-100, 6-100, 7-100, 8-100, 9-100, 10-100, 15-100, 20-100, 25-100, 30-100, 35-100, 40-100, 45-100, 50-100, 55-100, 60-100, 65-100, 70-100, 75-100, 80-100, 85-100, 90-100, or 95-100 mM KH₂PO₄. In some embodiments, the compound as described herein (e.g., compound (I) or a salt thereof, or compound (II)) is solubilized or diluted in a buffer comprising 0-95, 0-90, 0-85, 0-80, 0-75, 0-70, 0-65, 0-60, 0-55, 0-50, 0-45, 0-40, 0-35, 0-30, 0-25, 0-20, 0-15, 0-10, 0-9, 0-8, 0-7, 0-6, 0-5, 0-4, 0-3, 0-2, 0-1, 0-0.9, 0-0.8, 0-0.7, 0-0.6, 0-0.5, 0-0.4, 0-0.3, 0-0.2, 0-0.1, 0-0.09, 0-0.08, 0-0.07, 0-0.06, 0-0.05, 0-0.04, 0-0.03, or 0-0.02 mM KH₂PO₄. In some embodiments, the compound as described herein (e.g., compound (I) or a salt thereof, or compound (II)) is solubilized or diluted in a buffer comprising 0.01-95, 0.01-90, 0.01-85, 0.01-80, 0.01-75, 0.01-70, 0.01-65, 0.01-60, 0.01-55, 0.01-50, 0.01-45, 0.01-40, 0.01-35, 0.01-30, 0.01-25, 0.01-20, 0.01-15, 0.01-10, 0.01-9, 0.01-8, 0.01-7, 0.01-6, 0.01-5, 0.01-4, 0.01-3, 0.01-2, 0.01-1, 0.01-0.9, 0.01-0.8, 0.01-0.7, 0.01-0.6, 0.01-0.5, 0.01-0.4, 0.01-0.3, 0.01-0.2, 0.01-0.1, 0.01-0.09, 0.01-0.08, 0.01-0.07, 0.01-0.06, 0.01-0.05, 0.01-0.04, 0.01-0.03, or 0.01-0.02 mM KH₂PO₄. In some embodiments, the compound as described herein (e.g., compound (I) or a salt thereof, or compound (II)) is solubilized or diluted in a buffer comprising 0-3.0, 0-2.9, 0-2.8, 0-2.7, 0-2.6, 0-2.5, 0-2.4, 0-2.3, 0-2.2, 0-2.1, 0-2.0, 0-1.9, 0-1.8, 0-1.7, 0-1.6, 0-1.5, 0-1.4, 0-1.3, 0-1.2, 0-1.1, 0-1.0, 0-0.9, 0-0.8, 0-0.7, 0-0.6, 0-0.5, 0-0.4, 0-0.3, or 0-0.2 mM KH₂PO₄. In some embodiments, the compound as described herein (e.g., compound (I) or a salt thereof, or compound (II)) is solubilized or diluted in a buffer comprising 0.1-3.0, 0.1-2.9, 0.1-2.8, 0.1-2.7, 0.1-2.6, 0.1-2.5, 0.1-2.4, 0.1-2.3, 0.1-2.2, 0.1-2.1, 0.1-2.0, 0.1-1.9, 0.1-1.8, 0.1-1.7, 0.1-1.6, 0.1-1.5, 0.1-1.4, 0.1-1.3, 0.1-1.2, 0.1-1.1, 0.1-1.0, 0.1-0.9, 0.1-0.8, 0.1-0.7, 0.1-0.6, 0.1-0.5, 0.1-0.4, 0.1-0.3, or 0.1-0.2 mM KH₂PO₄. In some embodiments, the compound as described herein (e.g., compound (I) or a salt thereof, or compound (II)) is solubilized or diluted in a buffer comprising 0-3.0, 0.1-3.0, 0.2-3.0, 0.3-3.0, 0.4-3.0, 0.5-3.0, 0.6-3.0, 0.7-3.0, 0.8-3.0, 0.9-3.0, 1.0-3.0, 1.2-3.0, 1.3-3.0, 1.4-3.0, 1.5-3.0, 1.6-3.0, 1.7-3.0, 1.8-3.0, 1.9-3.0, 2.0-3.0, 2.1-3.0, 2.2-3.0, 2.3-3.0, 2.4-3.0, 2.5-3.0, 2.6-3.0, 2.7-3.0, 2.8-3.0, or 2.9-3.0 mM KH₂PO₄. In some embodiments, the compound as described herein (e.g., compound (I) or a salt thereof, or compound (II)) is solubilized or diluted in a buffer comprising at least 0, 0.1, 0.2, 0.3, 0.4, 0.5, 0.6, 0.7, 0.8, 0.9, 1.0, 1.1, 1.2, 1.3, 1.4, 1.5, 1.6, 1.7, 1.8, 1.9, 2.0, 2.1, 2.2, 2.3, 2.4, 2.5, 2.6, 2.7, 2.8, 2.9, or 3.0 mM KH₂PO₄. In some embodiments, the compound as described herein (e.g., compound (I) or a salt thereof, or compound (II)) is solubilized or diluted in a buffer comprising at most 0, 0.1, 0.2, 0.3, 0.4, 0.5, 0.6, 0.7, 0.8, 0.9, 1.0, 1.1, 1.2, 1.3, 1.4, 1.5, 1.6, 1.7, 1.8, 1.9, 2.0, 2.1, 2.2, 2.3, 2.4, 2.5, 2.6, 2.7, 2.8, 2.9, or 3.0 mM KH₂PO₄. In some embodiments, the compound as described herein (e.g., compound (I) or a salt thereof, or compound (II)) is solubilized or diluted in a buffer comprising 0.1, 0.2, 0.3, 0.4, 0.5, 0.6, 0.7, 0.8, 0.9, 1.0, 1.1, 1.2, 1.3, 1.4, 1.5, 1.6, 1.7, 1.8, 1.9, 2.0, 2.1, 2.2, 2.3, 2.4, 2.5, 2.6, 2.7, 2.8, 2.9, or 3.0 mM KH₂PO₄.

[0395] In some embodiments, the compound as described herein (e.g., compound (I) or a salt thereof, or compound (II)) is solubilized or diluted in a buffer comprising 0-50 mM NaH₂PO₄.

[0396] In some embodiments, the compound as described herein (e.g., compound (I) or a salt thereof, or compound (II)) is solubilized or diluted in a buffer comprising 0-50, 0-45, 0-40, 0-35, 0-30, 0-25, 0-20, 0-19, 0-18, 0-17, 0-16, 0-15, 0-14, 0-13, 0-12, 0-11, 0-10, 0-9, 0-8, 0-7, 0-6, 0-5, 0-4, 0-3, 0-2, 0-1, 0-0.9, 0-0.8, 0-0.7, 0-0.6, 0-0.5, 0-0.4, 0-0.3, or 0-0.2 mM NaH₂PO₄. In some embodiments, the compound as described herein (e.g., compound (I) or a salt thereof, or compound (II)) is solubilized or diluted in a buffer comprising 0.1-50, 0.1-45, 0.1-40, 0.1-35, 0.1-30, 0.1-25, 0.1-20, 0.1-19, 0.1-18, 0.1-17, 0.1-16, 0.1-15, 0.1-14, 0.1-13, 0.1-12, 0.1-11, 0.1-10, 0.1-9, 0.1-8, 0.1-7, 0.1-6, 0.1-5, 0.1-4, 0.1-3, 0.1-2, 0.1-1, 0.1-0.9, 0.1-0.8, 0.1-0.7, 0.1-0.6, 0.1-0.5, 0.1-0.4, 0.1-0.3, or 0.1-0.2 mM NaH₂PO₄. In some embodiments, the compound as described herein (e.g., compound (I) or a salt thereof, or compound (II)) is solubilized or diluted in a buffer comprising 0-50, 0.1-50, 0.2-50, 0.3-50, 0.4-50, 0.5-50, 0.6-50, 0.7-50, 0.8-50, 0.9-50, 1-50, 2-50, 3-50, 4-50, 5-50, 6-50, 7-50, 8-50, 9-50, 1-50, 11-50, 12-50, 13-50, 14-50, 15-50, 16-50, 17-50, 18-50, 19-50, 20-50, 25-50, 30-50, 35-50, 40-50, or 45-50 mM NaH₂PO₄. In some embodiments, the compound as described herein (e.g., compound (I) or a salt thereof, or compound (II)) is solubilized or diluted in a buffer comprising 0-20, 0.1-20, 0.2-20, 0.3-20, 0.4-20, 0.5-20, 0.6-20, 0.7-20, 0.8-20, 0.9-20, 1-20, 2-20, 3-20, 4-20, 5-20, 6-20, 7-20, 8-20, 9-20, 10-20, 11-20, 12-20, 13-20, 14-20, 15-20, 16-20, 17-20, 18-20, or 19-20 mM NaH₂PO₄. In some embodiments, the compound as described herein (e.g., (I) or a salt thereof, or compound (II)) is solubilized or diluted in a buffer comprising at least 0, 0.1, 0.2, 0.3, 0.4, 0.5, 0.6, 0.7, 0.8, 0.9, 1, 2, 3, 4, 5, 6, 7, 8, 9, 10, 11, 12, 13, 14, 15, 16, 17, 18, 19, or 20 mM NaH₂PO₄. In some embodiments, the compound as described herein (e.g., compound (I) or a salt thereof, or compound (II)) is solubilized or diluted in a buffer comprising at most 0, 0.1, 0.2, 0.3, 0.4, 0.5, 0.6, 0.7, 0.8, 0.9, 1, 2, 3, 4, 5, 6, 7, 8, 9, 10, 11, 12, 13, 14, 15, 16, 17, 18, 19, or 20 mM NaH₂PO₄. In some embodiments, the compound as described herein (e.g., compound (I) or a salt thereof, or compound (II)) is solubilized or diluted in a buffer comprising 0, 0.1, 0.2, 0.3, 0.4, 0.5, 0.6, 0.7, 0.8, 0.9, 1, 2, 3, 4, 5, 6, 7, 8, 9, 10, 11, 12, 13, 14, 15, 16, 17, 18, 19, or 20 mM NaH₂PO₄.

[0397] In some embodiments, the compound as described herein (e.g., compound (I) or a salt thereof, or compound (II)) is solubilized or diluted in a buffer further comprising carbohydrates. In some embodiments, the carbohydrates comprise D-glucose. In some embodiments, the compound as described herein (e.g., compound (I) or a salt thereof, or compound (II)) is solubilized or diluted in a buffer further comprising 1-100 mM D-glucose.

[0398] In some embodiments, the compound as described herein (e.g., compound (I) or a salt thereof, or compound (II)) is solubilized or diluted in a buffer comprising 1-100 mM D-glucose.

[0399] In some embodiments, the compound as described herein (e.g., compound (I) or a salt thereof, or compound (II)) is solubilized or diluted in a buffer comprising 1-100, 1-95, 1-90, 1-85, 1-80, 1-75, 1-70, 1-65, 1-60, 1-55, 1-50, 1-45, 1-40, 1-35, 1-30, 1-29, 1-28, 1-27, 1-26, 1-25, 1-24, 1-23, 1-22, 1-21, 1-20, 1-19, 1-18, 1-17, 1-16, 1-15, 1-14, 1-13, 1-12, 1-11, 1-10, 1-9, 1-8, 1-7, 1-6, 1-5, 1-4, 1-3, or 1-2 mM D-glucose. In some embodiments, the compound as described herein (e.g., compound (I) or a salt thereof, or compound (II)) is solubilized or diluted in a buffer comprising 2-100, 3-100, 4-100, 5-100, 6-100, 7-100, 8-100, 9-100, 10-100, 11-100, 12-100, 13-100, 14-100, 15-100, 16-100, 17-100, 18-100, 19-100, 20-100, 21-100, 22-100, 23-100, 24-100, 25-100, 26-100, 29-100, 28-100, 29-100, 30-100, 35-100, 40-100, 45-100, 50-100, 55-100, 60-100, 65-100, 70-100, 75-100, 80-100, 85-100, 90-100, or 95-100 mM D-glucose. In some embodiments, the compound as described herein (e.g., compound (I) or a salt thereof, or compound (II)) is solubilized or diluted in a buffer comprising 2-30, 3-30, 4-30, 5-30, 6-30, 7-30, 8-30, 9-30, 10-30, 11-30, 12-30, 13-30, 14-30, 15-30, 16-30, 17-30, 18-30, 19-30, 20-30, 21-30, 22-30, 23-30, 24-30, 25-30, 26-30, 27-30, 28-30, or 29-30 mM D-glucose. In some embodiments, the compound as described herein (e.g., compound (I) or a salt thereof, or compound (II)) is solubilized or diluted in a buffer comprising at least 1, 2, 3, 4, 5, 6, 7, 8, 9, 10, 11, 12, 13, 14, 15, 16, 17, 18, 19, 20, 21, 22, 23, 24, 25, 26, 27, 28, 29, or 30 mM D-glucose. In some embodiments, the compound as described herein (e.g., compound (I) or a salt thereof, or compound (II)) is solubilized or diluted in a buffer comprising at most 1, 2, 3, 4, 5, 6, 7, 8, 9, 10, 11, 12, 13, 14, 15, 16, 17, 18, 19, 20, 21, 22, 23, 24, 25, 26, 27, 28, 29, or 30 mM D-glucose. In some embodiments, the compound as described herein (e.g., compound (I) or a salt thereof, or compound (II)) is solubilized or diluted in a buffer comprising 1, 2, 3, 4, 5, 6, 7, 8, 9, 10, 11, 12, 13, 14, 15, 16, 17, 18, 19, 20, 21, 22, 23, 24, 25, 26, 27, 28, 29, or 30 mM D-glucose.

[0400] In some embodiments, the compound as described herein (e.g., compound (I) or a salt thereof, or compound (II)) is solubilized or diluted in a buffer comprising 25-250 mM NaCl, 0.1-20 mM KCl, 0.1-50 mM Na₂HPO₄, 0.1-50 mM NaH₂PO₄, 0.1-50 mM CaCl₂, and 0.1-50 mM MgCl₂.

[0401] In some embodiments, the compound as described herein (e.g., compound (I) or a salt thereof, or compound (II)) is solubilized or diluted in a buffer comprising 150 mM NaCl, 3.0 mM KCl, 0.7 mM Na₂HPO₄, 0.3 mM NaH₂PO₄, 0.79 mM MgCl₂, and 1.4 mM CaCl₂.

[0402] In some embodiments, the compound as described herein (e.g., compound (I) or a salt thereof, or compound (II)) is solubilized or diluted in a buffer further comprising an antioxidant. In some embodiments, the antioxidant is t-butylhydroxyquinoline (TBHQ), butylated hydroxytoluene (BHT), butylated hydroxyanisole (BHA), vitamin E, or any combination thereof. In some embodiments, the compound as described herein (e.g., compound (I) or a salt thereof, or compound (II)) is solubilized or diluted in a buffer further comprising an antioxidant, wherein the antioxidant is ascorbic acid (vitamin C), glutathione, lipoic acid, uric acid, carotenes, α-tocopherol (vitamin E), ubiquinol (coenzyme Q), or any combination thereof.

[0403] In some embodiments, the compound as described herein (e.g., compound (I) or a salt thereof, or compound (II)) is solubilized or diluted in a buffer comprising 25-250 mM NaCl, 0.1-20 mM KCl, 0-50 mM KH₂PO₄, 1-100 mM NaHCO₃, 0-50 mM NaH₂PO₄, 1-100 mM D-glucose, 0.1-50 mM CaCl₂, 0.1-50 mM MgCl₂, or any combination thereof.

[0404] In some embodiments, the compound as described herein (e.g., compound (I) or a salt thereof, or compound (II)) is solubilized or diluted in a buffer comprising 25-250 mM NaCl, 0.1-20 mM KCl, 0-50 mM KH₂PO₄, 1-100 mM NaHCO₃, 0-50 mM NaH₂PO₄, 1-100 mM D-glucose, 0.1-50 mM CaCl₂, and 0.1-50 mM MgCl₂.

[0405] In some embodiments, the compound as described herein (e.g., compound (I) or a salt thereof, or compound (II)) is solubilized or diluted in a buffer comprising 127 mM NaCl, 1.0 mM KCl, 1.2 mM KH₂PO₄, 26 mM NaHCO₃, 10 mM D-glucose, 2.4 mM CaCl₂, and 1.3 mM MgCl₂.

[0406] In some embodiments, the compound as described herein (e.g., compound (I) or a salt thereof, or compound (II)) is solubilized or diluted in a buffer comprising 119 mM NaCl, 26.2 mM NaHCO₃, 2.5 mM KCl, 1 mM NaH₂PO₄, 1.3 mM MgCl₂, 10 mM glucose, and 2.5 mM CaCl₂.

[0407] In some embodiments, the pharmaceutical formulation does not comprise a preservative. In some embodiments, the pharmaceutical formulation comprises a preservative.

[0408] In some embodiments, the compound as described herein (e.g., compound (I) or a salt thereof, or compound (II)) is solubilized or diluted to a concentration of from 5-250 mg/mL in the diluent.

[0409] In some embodiments, the compound as described herein (e.g., compound (I) or a salt thereof, or compound (II)) is solubilized or diluted to a concentration of from 5-250, 5-247.5, 5-245, 5-242.5, 5-240, 5-237.5, 5-235, 5-232.5, 5-230, 5-227.5, 5-225, 5-225.5, 5-220, 5-217.5, 5-215, 5-212.5, 5-210, 5-205.5, 5-205, 5-202.5, 5-200, 5-197.5, 5-195, 5-192.5, 5-190, 5-187.5, 5-185, 5-182.5, 5-180, 5-177.5, 5-175, 5-172.5, 5-170, 5-167.5, 5-165, 5-162.5, 5-160, 5-157.5, 5-155, 5-152.5, 5-150, 5-147.5, 5-145, 5-142.5, 5-140, 5-137.5, 5-135, 5-132.5, 5-130, 5-127.5, 5-125, 5-122.5, 5-120, 5-117.5, 5-115, 5-112.5, 5-110, 5-107.5, 5-105, 5-102.5, 5-100, 5-97.5, 5-95, 5-92.5, 5-90, 5-87.5, 5-85, 5-82.5, 5-80, 5-77.5, 5-75, 5-72.5, 5-70, 5-67.5, 5-65, 5-62.5, 5-60, 5-57.5, 5-55, 5-52.5, 5-50, 5-47.5, 5-45, 5-42.5, 5-40, 5-37.5, 5-35, 5-32.5, 5-30, 5-27.5, 5-25, 5-22.5, 5-20, 5-17.5, 5-15, 5-12.5, or 5-10 mg/mL in the diluent. In some embodiments, the compound as described herein (e.g., compound (I) or a salt thereof, or compound (II)) is solubilized or diluted to a concentration of from 10-250, 15-250, 20-250, 25-250, 30-250, 35-250, 40-250, 45-250, 50-250, 55-250, 60-250, 65-250, 70-250, 75-250, 80-250, 85-250, 90-250, 95-250, 100-250, 105-250, 110-250, 115-250, 120-250, 125-250, 130-250, 135-250, 140-250, 145-250, 150-250, 155-250, 160-250, 165-250, 170-250, 175-250, 180-250, 185-250, 190-250, or 195-250, 200-250, 205-250, 210-250, 215-250, 220-250, 225-250, 230-250, 235-250, 240-250, or 245-250 mg/mL in the diluent. In some embodiments, the compound as described herein (e.g., compound (I) or a salt thereof, or compound (II)) is solubilized or diluted to a concentration of from at least 1, 2, 3, 4, 5, 6, 7, 8, 9, 10, 11, 12, 13, 14, 15, 16, 17, 18, 19, 20, 21, 22, 23, 24, 25, 26, 27, 28, 29, 30, 31, 32, 33, 34, 35, 36, 37, 38, 39, 40, 41, 42, 43, 44, 45, 46, 47, 48, 49, 50, 51, 52, 53, 54, 55, 56, 57, 58, 59, 60, 61, 62, 63, 64, 65, 66, 67, 68, 69, 70, 71, 72, 73, 74, 75, 76, 77, 78, 79, 80, 81, 82, 83, 84, 85, 86, 87, 88, 89, 90, 91, 92, 93, 94, 95, 96, 97, 98, 99, 100, 101, 102, 103, 104, 105, 106, 107, 108, 109, 110, 111, 112, 113, 114, 115, 116, 117, 118, 119, 120, 121, 122, 123, 124, 125, 126, 127, 128, 129, 130, 131, 132, 133, 134, 135, 136, 137, 138, 139, 140, 141, 142, 143, 144, 145, 146, 147, 148, 149, 150, 151, 152, 153, 154, 155, 156, 157, 158, 159, 160, 161, 162, 163, 164, 165, 166, 167, 168, 169, 170, 171, 172, 173, 174, 175, 176, 177, 178, 179, 180, 181, 182, 183, 184, 185, 186, 187, 188, 189, 190, 191, 192, 193, 194, 195, 196, 197, 198, 199, 200, 210, 211, 212, 213, 214, 215, 216, 217, 218, 219, 220, 221, 222, 223, 224, 225, 226, 227, 228, 229, 230, 231, 232, 233, 234, 235, 236, 237, 238, 239, 240, 241, 242, 243, 244, 245, 246, 247, 248, 249, or 250 mg/mL in the diluent. In some embodiments, the compound as described herein (e.g., compound (I) or a salt thereof, or compound (II)) is solubilized or diluted to a concentration of from at most 1, 2, 3, 4, 5, 6, 7, 8, 9, 10, 11, 12, 13, 14, 15, 16, 17, 18, 19, 20, 21, 22, 23, 24, 25, 26, 27, 28, 29, 30, 31, 32, 33, 34, 35, 36, 37, 38, 39, 40, 41, 42, 43, 44, 45, 46, 47, 48, 49, 50, 51, 52, 53, 54, 55, 56, 57, 58, 59, 60, 61, 62, 63, 64, 65, 66, 67, 68, 69, 70, 71, 72, 73, 74, 75, 76, 77, 78, 79, 80, 81, 82, 83, 84, 85, 86, 87, 88, 89, 90, 91, 92, 93, 94, 95, 96, 97, 98, 99, 100, 101, 102, 103, 104, 105, 106, 107, 108, 109, 110, 111, 112, 113, 114, 115, 116, 117, 118, 119, 120, 121, 122, 123, 124, 125, 126, 127, 128, 129, 130, 131, 132, 133, 134, 135, 136, 137, 138, 139, 140, 141, 142, 143, 144, 145, 146, 147, 148, 149, 150, 151, 152, 153, 154, 155, 156, 157, 158, 159, 160, 161, 162, 163, 164, 165, 166, 167, 168, 169, 170, 171, 172, 173, 174, 175, 176, 177, 178, 179, 180, 181, 182, 183, 184, 185, 186, 187, 188, 189, 190, 191, 192, 193, 194, 195, 196, 197, 198, 199, 200, 210, 211, 212, 213, 214, 215, 216, 217, 218, 219, 220, 221, 222, 223, 224, 225, 226, 227, 228, 229, 230, 231, 232, 233, 234, 235, 236, 237, 238, 239, 240, 241, 242, 243, 244, 245, 246, 247, 248, 249, or 250 mg/mL in the diluent. In some embodiments, the compound as described herein (e.g., compound (I) or a salt thereof, or compound (II)) is solubilized or diluted to a concentration of from 1, 2, 3, 4, 5, 6, 7, 8, 9, 10, 11, 12, 13, 14, 15, 16, 17, 18, 19, 20, 21, 22, 23, 24, 25, 26, 27, 28, 29, 30, 31, 32, 33, 34, 35, 36, 37, 38, 39, 40, 41, 42, 43, 44, 45, 46, 47, 48, 49, 50, 51, 52, 53, 54, 55, 56, 57, 58, 59, 60, 61, 62, 63, 64, 65, 66, 67, 68, 69, 70, 71, 72, 73, 74, 75, 76, 77, 78, 79, 80, 81, 82, 83, 84, 85, 86, 87, 88, 89, 90, 91, 92, 93, 94, 95, 96, 97, 98, 99, 100, 101, 102, 103, 104, 105, 106, 107, 108, 109, 110, 111, 112, 113, 114, 115, 116, 117, 118, 119, 120, 121, 122, 123, 124, 125, 126, 127, 128, 129, 130, 131, 132, 133, 134, 135, 136, 137, 138, 139, 140, 141, 142, 143, 144, 145, 146, 147, 148, 149, 150, 151, 152, 153, 154, 155, 156, 157, 158, 159, 160, 161, 162, 163, 164, 165, 166, 167, 168, 169, 170, 171, 172, 173, 174, 175, 176, 177, 178, 179, 180, 181, 182, 183, 184, 185, 186, 187, 188, 189, 190, 191, 192, 193, 194, 195, 196, 197, 198, 199, 200, 210, 211, 212, 213, 214, 215, 216, 217, 218, 219, 220, 221, 222, 223, 224, 225, 226, 227, 228, 229, 230, 231, 232, 233, 234, 235, 236, 237, 238, 239, 240, 241, 242, 243, 244, 245, 246, 247, 248, 249, or 250 mg/mL in the diluent.

[0410] In some embodiments, the compound as described herein (e.g., compound (I) or a salt thereof, or compound (II)) is present in the pharmaceutical composition at a concentration of the compound as described herein (e.g., compound (I) or a salt thereof, or compound (II)) is present in the pharmaceutical composition at a concentration of from 0.1 mg/mL to 250 mg/mL. In some embodiments, the compound as described herein (e.g., compound (I) or a salt thereof, or compound (II)) is present in the pharmaceutical composition at a concentration of about 0.1 mg/mL, 0.5 mg/mL, 1 mg/mL, 2 mg/mL, 2.5 mg/mL, 3 mg/mL, 4 mg/mL, 5 mg/mL, 6 mg/mL, 7 mg/mL, 8 mg/mL, 9 mg/mL, 10 mg/mL, 11 mg/mL, 12 mg/mL, 13 mg/mL, 14 mg/mL, 15 mg/mL, 16 mg/mL, 17 mg/mL, 18 mg/mL, 19 mg/mL, or 20 mg/mL. In some embodiments, the compound as described herein (e.g., compound (I) or a salt thereof, or compound (II)) is present in the pharmaceutical composition at a concentration of about 30 mg/mL, 40 mg/mL, 50 mg/mL, 60 mg/mL, 70 mg/mL, 80 mg/mL, 90 mg/mL, 100 mg/mL, 110 mg/mL, 120 mg/mL, 130 mg/mL, 140 mg/mL, 150 mg/mL, 160 mg/mL, 170 mg/mL, 180 mg/mL, 190 mg/mL, or 200 mg/mL. In some embodiments, the compound as described herein (e.g., compound (I) or a salt thereof, or compound (II)) is present in the pharmaceutical composition at a concentration of about 22.5 mg/mL, 25 mg/mL, 27.5 mg/mL, 30 mg/mL, 32.5 mg/mL, 35 mg/mL, 37.5 mg/mL, 40 mg/mL, 42.5 mg/mL, 45 mg/mL, 47.5 mg/mL, 50 mg/mL, 52.5 mg/mL, 55 mg/mL, 57.5 mg/mL, 60 mg/mL, 62.5 mg/mL, 65 mg/mL, 67.5 mg/mL, 70 mg/mL, 72.5 mg/mL, 75 mg/mL, 77.5 mg/mL, 80 mg/mL, 82.5 mg/mL, 85 mg/mL, 87.5 mg/mL, 90 mg/mL, 92.5 mg/mL, 95 mg/mL, 97.5 mg/mL, 100 mg/mL, 102.5 mg/mL, 105 mg/mL, 107.5 mg/mL, 110 mg/mL, 112.5 mg/mL, 115 mg/mL, 117.5 mg/mL, 120 mg/mL, 122.5 mg/mL, 125 mg/mL, 127.5 mg/mL, 130 mg/mL, 132.5 mg/mL, 135 mg/mL, 137.5 mg/mL, 140 mg/mL, 142.5 mg/mL, 145 mg/mL, 147.5 mg/mL, 150 mg/mL, 152.5 mg/mL, 155 mg/mL, 157.5 mg/mL, 160 mg/mL, 162.5 mg/mL, 165 mg/mL, 167.5 mg/mL, 170 mg/mL, 172.5 mg/mL, 175 mg/mL, 177.5 mg/mL, 180 mg/mL, 182.5 mg/mL, 185 mg/mL, 187.5 mg/mL, 190 mg/mL, 192.5 mg/mL, 195 mg/mL, 197.5 mg/mL, 200 mg/mL, 202.5 mg/mL, 205 mg/mL, 207.5 mg/mL, 210 mg/mL, 212.5 mg/mL, 215 mg/mL, 217.5 mg/mL, 220 mg/mL, 222.5 mg/mL, 225 mg/mL, 227.5 mg/mL, 230 mg/mL, 232.5 mg/mL, 235 mg/mL, 237.5 mg/mL, 240 mg/mL, 242.5 mg/mL, 245 mg/mL, 247.5 mg/mL, or 250 mg/mL. In some embodiments, the compound as described herein (e.g., compound (I) or a salt thereof, or compound (II)) is solubilized or diluted to a concentration of 11 mg/mL, 22 mg/mL, 33 mg/mL, 44 mg/mL, 55 mg/mL, 66 mg/mL, 77 mg/mL, 88 mg/mL, 99 mg/mL, or 100 mg/mL in the diluent.

[0411] In some embodiments, the compound as described herein (e.g., compound (I) or a salt thereof, or compound (II)) is present in the pharmaceutical composition at a concentration of from 0.1 mg/mL to 250 mg/mL, from 0.2 mg/mL to 250 mg/mL, from 0.3 mg/mL to 250 mg/mL, from 0.4 mg/mL to 250 mg/mL, from 0.5 mg/mL to 250 mg/mL, from 0.6 mg/mL to 250 mg/mL, from 0.7 mg/mL to 250 mg/mL, from 0.8 mg/mL to 250 mg/mL, from 0.9 mg/ml to 250 mg/mL, from 1.0 mg/mL to 250 mg/mL, from 1.1 mg/mL to 250 mg/mL, from 1.2 mg/mL to 250 mg/mL, from 1.3 mg/mL to 250 mg/mL, from 1.4 mg/mL to 250 mg/mL, from 1.5 mg/mL to 250 mg/mL, from 1.6 mg/mL to 250 mg/mL, from 1.7 mg/mL to 250 mg/mL, from 1.8 mg/mL to 250 mg/mL, from 1.9 mg/mL to 250 mg/mL, from 2.0 mg/mL to 250 mg/mL, from 2.1 mg/mL to 250 mg/mL, from 2.2 mg/mL to 250 mg/mL, from 2.3 mg/mL to 250 mg/mL, from 2.4 mg/mL to 250 mg/mL, from 2.5 mg/mL to 250 mg/mL, from 2.6 mg/mL to 250 mg/mL, from 2.7 mg/mL to 250 mg/mL, from 2.8 mg/mL to 250 mg/mL, from 2.9 mg/mL to 250 mg/mL, from 3.0 mg/mL to 250 mg/mL, from 3.1 mg/mL to 250 mg/mL, from 3.2 mg/mL to 250 mg/mL, from 3.3 mg/mL to 250 mg/mL, from 3.4 mg/mL to 250 mg/mL, from 3.5 mg/mL to 250 mg/mL, from 3.6 mg/mL to 250 mg/mL, from 3.7 mg/mL to 250 mg/mL, from 3.8 mg/mL to 250 mg/mL, from 3.9 mg/mL to 250 mg/mL, from 4.0 mg/mL to 250 mg/mL, from 5.0 mg/mL to 250 mg/mL, from 6.0 mg/mL to 250 mg/mL, from 7.0 mg/mL to 250 mg/mL, from 8.0 mg/mL to 250 mg/mL, from 9.0 mg/mL to 250 mg/mL, from 10 mg/mL to 250 mg/mL, from 15 mg/mL to 250 mg/mL, from 20 mg/mL to 250 mg/mL, from 25 mg/mL to 250 mg/mL, from 30 mg/mL to 250 mg/mL, from 35 mg/mL to 250 mg/mL, from 40 mg/mL to 250 mg/mL, from 45 mg/mL to 250 mg/mL, from 50 mg/mL to 250 mg/mL, from 55 mg/mL to 250 mg/mL, from 60 mg/mL to 250 mg/mL, from 65 mg/mL to 250 mg/mL, from 70 mg/mL to 250 mg/mL, from 75 mg/mL to 250 mg/mL, from 80 mg/mL to 250 mg/mL, from 85 mg/mL to 250 mg/mL, from 90 mg/mL to 250 mg/mL, from 95 mg/mL to 250 mg/mL, from 100 mg/mL to 250 mg/mL, from 105 mg/mL to 250 mg/mL, from 110 mg/mL to 250 mg/mL, from 115 mg/mL to 250 mg/mL, from 120 mg/mL to 250 mg/mL, from 125 mg/mL to 250 mg/mL, from 130 mg/mL to 250 mg/mL, from 135 mg/mL to 250 mg/mL, from 140 mg/mL to 250 mg/mL, from 145 mg/mL to 250 mg/mL, from 150 mg/mL to 250 mg/mL, from 155 mg/mL to 250 mg/mL, from 160 mg/mL to 250 mg/mL, from 165 mg/mL to 250 mg/mL, from 170 mg/mL to 250 mg/mL, from 175 mg/mL to 250 mg/mL, from 180 mg/mL to 250 mg/mL, from 185 mg/mL to 250 mg/mL, from 190 mg/mL to 250 mg/mL, from 195 mg/mL to 250 mg/mL, 200 mg/mL to 250 mg/mL, from 205 mg/mL to 250 mg/mL, from 210 mg/mL to 250 mg/mL, from 215 mg/mL to 250 mg/mL, from 220 mg/mL to 250 mg/mL, from 225 mg/mL to 250 mg/mL, from 230 mg/mL to 250 mg/mL, from 235 mg/mL to 250 mg/mL, from 240 mg/mL to 250 mg/mL, or from 245 mg/mL to 250 mg/mL.

[0412] In some embodiments, the compound as described herein (e.g., compound (I) or a salt thereof, or compound (II)) is present in the pharmaceutical composition at a concentration of from 0.1 mg/mL to 250 mg/mL, from 0.1 mg/mL to 245 mg/mL, from 0.1 mg/mL to 240 mg/mL, from 0.1 mg/mL to 235 mg/mL, from 0.1 mg/mL to 230 mg/mL, from 0.1 mg/mL to 225 mg/mL, from 0.1 mg/mL to 220 mg/mL, from 0.1 mg/mL to 215 mg/mL, from 0.1 mg/mL to 210 mg/mL, from 0.1 mg/mL to 205 mg/mL, from 0.1 mg/mL to 200 mg/mL, from 0.1 mg/mL to 195 mg/mL, from 0.1 mg/mL to 190 mg/mL, from 0.1 mg/mL to 185 mg/mL, from 0.1 mg/mL to 180 mg/mL, from 0.1 mg/mL to 175 mg/mL, from 0.1 mg/mL to 170 mg/mL, from 0.1 mg/mL to 165 mg/mL, from 0.1 mg/mL to 160 mg/mL, from 0.1 mg/mL to 155 mg/mL, from 0.1 mg/mL to 150 mg/mL, from 0.1 mg/mL to 145 mg/mL, from 0.1 mg/mL to 140 mg/mL, from 0.1 mg/mL to 135 mg/mL, from 0.1 mg/mL to 130 mg/mL, from 0.1 mg/mL to 125 mg/mL, from 0.1 mg/mL to 120 mg/mL, from 0.1 mg/mL to 115 mg/mL, from 0.1 mg/mL to 110 mg/mL, from 0.1 mg/mL to 100 mg/mL, from 0.1 mg/mL to 95 mg/mL, from 0.1 mg/mL to 90 mg/mL, from 0.1 mg/mL to 85 mg/mL, from 0.1 mg/mL to 80 mg/mL, from 0.1 mg/mL to 75 mg/mL, from 0.1 mg/mL to 70 mg/mL, from 0.1 mg/mL to 65 mg/mL, from 0.1 mg/mL to 60 mg/mL, from 0.1 mg/mL to 55 mg/mL, from 0.1 mg/mL to 50 mg/mL, from 0.1 mg/mL to 45 mg/mL, from 0.1 mg/mL to 40 mg/mL, from 0.1 mg/mL to 35 mg/mL, from 0.1 mg/mL to 30 mg/mL, from 0.1 mg/mL to 25 mg/mL, from 0.1 mg/mL to 20 mg/mL, from 0.1 mg/mL to 15 mg/mL, from 0.1 mg/mL to 10 mg/mL, from 0.1 mg/mL to 9 mg/mL, from 0.1 mg/mL to 8 mg/mL, from 0.1 mg/mL to 7 mg/mL, from 0.1 mg/mL to 6 mg/mL, from 0.1 mg/mL to 5 mg/mL, from 0.1 mg/mL to 4 mg/mL, from 0.1 mg/mL to 3.9 mg/mL, from 0.1 mg/mL to 3.8 mg/mL, from 0.1 mg/mL to 3.7 mg/mL, from 0.1 mg/mL to 3.6 mg/mL, from 0.1 mg/mL to 3.5 mg/mL, from 0.1 mg/mL to 3.4 mg/mL, from 0.1 mg/mL to 3.3 mg/mL, from 0.1 mg/mL to 3.2 mg/mL, from 0.1 mg/mL to 3.1 mg/mL, from 0.1 mg/mL to 3.0 mg/mL, from 0.1 mg/mL to 2.9 mg/mL, from 0.1 mg/mL to 2.8 mg/mL, from 0.1 mg/mL to 2.7 mg/mL, from 0.1 mg/mL to 2.6 mg/mL, from 0.1 mg/mL to 2.5 mg/mL, from 0.1 mg/mL to 2.4 mg/mL, from 0.1 mg/mL to 2.3 mg/mL, from 0.1 mg/mL to 2.2 mg/mL, from 0.1 mg/mL to 2.1 mg/mL, from 0.1 mg/mL to 2.0 mg/mL, from 0.1 mg/mL to 1.9 mg/mL, from 0.1 mg/mL to 1.8 mg/mL, from 0.1 mg/mL to 1.7 mg/mL, from 0.1 mg/mL to 1.6 mg/mL, from 0.1 mg/mL to 1.5 mg/mL, from 0.1 mg/mL to 1.4 mg/mL, from 0.1 mg/mL to 1.3 mg/mL, from 0.1 mg/mL to 1.2 mg/mL, from 0.1 mg/mL to 1.1 mg/mL, from 0.1 mg/mL to 1.0 mg/mL, from 0.1 mg/mL to 0.9 mg/mL, from 0.1 mg/mL to 0.8 mg/mL, from 0.1 mg/mL to 0.7 mg/mL, from 0.1 mg/mL to 0.6 mg/mL, from 0.1 mg/mL to 0.5 mg/mL, from 0.1 mg/mL to 0.4 mg/mL, from 0.1 mg/mL to 0.3 mg/mL, or from 0.1 mg/mL to 0.2 mg/mL.

[0413] In some embodiments, the compound as described herein (e.g., compound (I) or a salt thereof, or compound (II)) is solubilized or diluted to a concentration of at least 0.1, 0.2, 0.3, 0.4, 0.5, 0.6, 0.7, 0.8, 0.9, 1.0, 1.1, 1.2, 1.3, 1.4, 1.5, 1.6, 1.7, 1.8, 1.9, 2.0, 2.1, 2.2, 2.3, 2.4, 2.5, 2.6, 2.7, 2.8, 2.9, 3.0, 3.1, 3.2, 3.3, 3.4, 3.5, 3.6, 3.7, 3.8, 3.9, 4.0, 4.1, 4.2, 4.3, 4.4, 4.5, 4.6, 4.7, 4.8, 4.9, 5, 6, 7, 8, 9, 10, 11, 12, 13, 14, 15, 16, 17, 18, 19, 20, 21, 22, 23, 24, 25, 26, 27, 28, 29, 30, 31, 32, 33, 34, 35, 36, 37, 38, 39, 40, 41, 42, 43, 44, 45, 46, 47, 48, 49, 50, 51, 52, 53, 54, 55, 56, 57, 58, 59, 60, 61, 62, 63, 64, 65, 66, 67, 68, 69, 70, 71, 72, 73, 74, 75, 76, 77, 78, 79, 80, 81, 82, 83, 84, 85, 86, 87, 88, 89, 90, 91, 92, 93, 94, 95, 96, 97, 98, 99, 100, 101, 102, 103, 104, 105, 106, 107, 108, 109, 110, 111, 112, 113, 114, 115, 116, 117, 118, 119, 120, 121, 122, 123, 124, 125, 126, 127, 128, 129, 130, 131, 132, 133, 134, 135, 136, 137, 138, 139, 140, 141, 142, 143, 144, 145, 146, 147, 148, 149, 150, 151, 152, 153, 154, 155, 156, 157, 158, 159, 160, 161, 162, 163, 164, 165, 166, 167, 168, 169, 170, 171, 172, 173, 174, 175, 176, 177, 178, 179, 180, 181, 182, 183, 184, 185, 186, 187, 188, 189, 190, 191, 192, 193, 194, 195, 196, 197, 198, 199, 200, 210, 211, 212, 213, 214, 215, 216, 217, 218, 219, 220, 221, 222, 223, 224, 225, 226, 227, 228, 229, 230, 231, 232, 233, 234, 235, 236, 237, 238, 239, 240, 241, 242, 243, 244, 245, 246, 247, 248, 249, or 250 mg/mL in the diluent. In some embodiments, the compound as described herein (e.g., compound (I) or a salt thereof, or compound (II)) is solubilized or diluted to a concentration of at most 0.1, 0.2, 0.3, 0.4, 0.5, 0.6, 0.7, 0.8, 0.9, 1.0, 1.1, 1.2, 1.3, 1.4, 1.5, 1.6, 1.7, 1.8, 1.9, 2.0, 2.1, 2.2, 2.3, 2.4, 2.5, 2.6, 2.7, 2.8, 2.9, 3.0, 3.1, 3.2, 3.3, 3.4, 3.5, 3.6, 3.7, 3.8, 3.9, 4.0, 4.1, 4.2, 4.3, 4.4, 4.5, 4.6, 4.7, 4.8, 4.9, 5, 6, 7, 8, 9, 10, 11, 12, 13, 14, 15, 16, 17, 18, 19, 20, 21, 22, 23, 24, 25, 26, 27, 28, 29, 30, 31, 32, 33, 34, 35, 36, 37, 38, 39, 40, 41, 42, 43, 44, 45, 46, 47, 48, 49, 50, 51, 52, 53, 54, 55, 56, 57, 58, 59, 60, 61, 62, 63, 64, 65, 66, 67, 68, 69, 70, 71, 72, 73, 74, 75, 76, 77, 78, 79, 80, 81, 82, 83, 84, 85, 86, 87, 88, 89, 90, 91, 92, 93, 94, 95, 96, 97, 98, 99, 100, 101, 102, 103, 104, 105, 106, 107, 108, 109, 110, 111, 112, 113, 114, 115, 116, 117, 118, 119, 120, 121, 122, 123, 124, 125, 126, 127, 128, 129, 130, 131, 132, 133, 134, 135, 136, 137, 138, 139, 140, 141, 142, 143, 144, 145, 146, 147, 148, 149, 150, 151, 152, 153, 154, 155, 156, 157, 158, 159, 160, 161, 162, 163, 164, 165, 166, 167, 168, 169, 170, 171, 172, 173, 174, 175, 176, 177, 178, 179, 180, 181, 182, 183, 184, 185, 186, 187, 188, 189, 190, 191, 192, 193, 194, 195, 196, 197, 198, 199, 200, 210, 211, 212, 213, 214, 215, 216, 217, 218, 219, 220, 221, 222, 223, 224, 225, 226, 227, 228, 229, 230, 231, 232, 233, 234, 235, 236, 237, 238, 239, 240, 241, 242, 243, 244, 245, 246, 247, 248, 249, or 250 mg/mL in the diluent. In some embodiments, the compound as described herein (e.g., compound (I) or a salt thereof, or compound (II)) is solubilized or diluted to a concentration of 0.1, 0.2, 0.3, 0.4, 0.5, 0.6, 0.7, 0.8, 0.9, 1.0, 1.1, 1.2, 1.3, 1.4, 1.5, 1.6, 1.7, 1.8, 1.9, 2.0, 2.1, 2.2, 2.3, 2.4, 2.5, 2.6, 2.7, 2.8, 2.9, 3.0, 3.1, 3.2, 3.3, 3.4, 3.5, 3.6, 3.7, 3.8, 3.9, 4.0, 4.1, 4.2, 4.3, 4.4, 4.5, 4.6, 4.7, 4.8, 4.9, 5, 6, 7, 8, 9, 10, 11, 12, 13, 14, 15, 16, 17, 18, 19, 20, 21, 22, 23, 24, 25, 26, 27, 28, 29, 30, 31, 32, 33, 34, 35, 36, 37, 38, 39, 40, 41, 42, 43, 44, 45, 46, 47, 48, 49, 50, 51, 52, 53, 54, 55, 56, 57, 58, 59, 60, 61, 62, 63, 64, 65, 66, 67, 68, 69, 70, 71, 72, 73, 74, 75, 76, 77, 78, 79, 80, 81, 82, 83, 84, 85, 86, 87, 88, 89, 90, 91, 92, 93, 94, 95, 96, 97, 98, 99, 100, 101, 102, 103, 104, 105, 106, 107, 108, 109, 110, 111, 112, 113, 114, 115, 116, 117, 118, 119, 120, 121, 122, 123, 124, 125, 126, 127, 128, 129, 130, 131, 132, 133, 134, 135, 136, 137, 138, 139, 140, 141, 142, 143, 144, 145, 146, 147, 148, 149, 150, 151, 152, 153, 154, 155, 156, 157, 158, 159, 160, 161, 162, 163, 164, 165, 166, 167, 168, 169, 170, 171, 172, 173, 174, 175, 176, 177, 178, 179, 180, 181, 182, 183, 184, 185, 186, 187, 188, 189, 190, 191, 192, 193, 194, 195, 196, 197, 198, 199, 200, 210, 211, 212, 213, 214, 215, 216, 217, 218, 219, 220, 221, 222, 223, 224, 225, 226, 227, 228, 229, 230, 231, 232, 233, 234, 235, 236, 237, 238, 239, 240, 241, 242, 243, 244, 245, 246, 247, 248, 249, or 250 mg/mL in the diluent.

[0414] In some embodiments, the pharmaceutical formulation does not comprise a preservative. In some embodiments, the pharmaceutical formulation comprises a preservative.

[0415] A pharmaceutical composition used in the therapeutic methods of the invention is formulated to be compatible with its intended route of administration.

[0416] A pharmaceutical composition used in the therapeutic methods of the invention is formulated to be delivered to the brain/CNS through the intended route of administration. Routes of delivery to the CNS/brain include, but are not limited to, intrathecal administration (e.g., via the cisterna magna or via lumbar puncture), intracranial administration, e.g., intracerebroventricular administration, or lateral cerebroventricular administration, endovascular administration, and intraparenchymal administration.

[0417] In some embodiments, the pharmaceutical formulation is suitable for an intracerebroventricular or intrathecal (IT) injection. Intrathecal administration: As used herein, the term “intrathecal administration” or “intrathecal injection” refers to an injection into the spinal canal (intrathecal space surrounding the spinal cord). Various techniques can be used, including, without limitation, lateral cerebroventricular injection through a lumen or lumen puncture or puncture hole or the like. In some embodiments, “intrathecal administration” or “intrathecal administration” in accordance with the present invention refers to administration or administration of IT through the lumbar area or region, i.e., administration or administration of lumbar IT. As used herein, the term “lumbar region” or “lumbar area” refers to the area between the third and fourth lumbar vertebrae (lower back) and, more inclusive, the L2-S1 region of the spine vertebral.

[0418] In some embodiments, the pharmaceutical formulation is suitable for oral, rectal, intranasal, intradermal, subcutaneous, intrathecal, intracerebroventricular, intraperitoneal, intramuscular, intravitreal, intravenous, intracranial, intrabuccal, or sublingual administration. In some embodiments, the pharmaceutical formulation is suitable for intradermal, subcutaneous, intrathecal, intranasal, intracranial, intracerebroventricular, intraperitoneal, intramuscular, intravitreal, or intravenous injection.

[0419] In some embodiments, the pharmaceutical formulation is packaged in a single use vial. In some embodiments, the pharmaceutical formulation is packaged in a multiple use vial.

[0420] Pharmaceutical formulations comprising the compound, e.g., antisense oligomer, of the described compositions and for use in any of the described methods can be prepared according to conventional techniques well known in the pharmaceutical industry and described in the published literature. In some embodiments, a pharmaceutical formulation for treating a subject comprises an effective amount of any compound as described herein, or a pharmaceutically acceptable salt, solvate, hydrate or ester thereof. In some embodiments, the pharmaceutical composition described herein further comprises a pharmaceutically acceptable excipient, carrier or diluent.

[0421] Such compositions may comprise buffers such as neutral buffered saline, phosphate buffered saline and the like; carbohydrates such as glucose, mannose, sucrose or dextrans, mannitol; proteins; polypeptides or amino acids such as glycine; antioxidants; chelating agents such as EDTA or glutathione; adjuvants (e.g., aluminum hydroxide); and preservatives.

[0422] A pharmaceutical composition used in the therapeutic methods of the invention is formulated to be compatible with its intended route of administration.

[0423] The terms “pharmaceutical composition” and “pharmaceutical formulation” (or “formulation”) are used interchangeably and denote a mixture or solution comprising a therapeutically effective amount of an active pharmaceutical ingredient together with one or more pharmaceutically acceptable excipients to be administered to a subject, e.g., a human in need thereof.

[0424] In some embodiments, the compositions are formulated into any of many possible dosage forms such as, but not limited to, solutions, liquids, tablets, capsules, gel capsules, liquid syrups, soft gels, suppositories, and enemas. In some embodiments, the compositions are formulated as suspensions in aqueous, non-aqueous or mixed media. Aqueous suspensions may further contain substances that increase the viscosity of the suspension including, for example, sodium carboxymethylcellulose, sorbitol and/or dextran. The suspension may also contain stabilizers. In some embodiments, a pharmaceutical formulation or composition of the present invention includes, but is not limited to, a solution, emulsion, microemulsion, foam or liposome-containing formulation (e.g., cationic or noncationic liposomes).

[0425] The pharmaceutical composition or formulation described herein may comprise one or more penetration enhancers, carriers, excipients or other active or inactive ingredients as appropriate and well known to those of skill in the art or described in the published literature. In some embodiments, liposomes also include sterically stabilized liposomes, e.g., liposomes comprising one or more specialized lipids. These specialized lipids result in liposomes with enhanced circulation lifetimes. In some embodiments, a sterically stabilized liposome comprises one or more glycolipids or is derivatized with one or more hydrophilic polymers, such as a polyethylene glycol (PEG) moiety. In some embodiments, a surfactant is included in the pharmaceutical formulation or compositions. The use of surfactants in drug products, formulations and emulsions is well known in the art. In some embodiments, the present invention employs a penetration enhancer to effect the efficient delivery of the compound, e.g., oligomer, e.g., to aid diffusion across cell membranes and/or enhance the permeability of a lipophilic drug. In some embodiments, the penetration enhancers are a surfactant, fatty acid, bile salt, chelating agent, or non-chelating nonsurfactant.

[0426] In some embodiments, the pharmaceutical formulation comprises multiple compounds, e.g., multiple antisense oligomers. In some embodiments, the compound (e.g., antisense oligomer) is administered in combination with another drug or therapeutic agent.

[0427] Pharmaceutical compositions suitable for injectable use include sterile aqueous solutions (where water soluble) or dispersions and sterile powders for the extemporaneous preparation of sterile injectable solutions or dispersion. Solutions or suspensions used for parenteral, intranasal, intradermal, or subcutaneous application can include the following components: a sterile diluent such as water for injection, saline solution, fixed oils, polyethylene glycols, glycerin, propylene glycol or other synthetic solvents; antibacterial agents such as benzyl alcohol or methyl parabens; antioxidants such as ascorbic acid or sodium bisulfite; chelating agents such as ethylenediaminetetraacetic acid; buffers such as acetates, citrates or phosphates and agents for the adjustment of tonicity such as sodium chloride or dextrose. For example, depending on the injection site, the vehicle may contain water, synthetic or vegetable oil, and/or organic co-solvents. In certain instances, such as with lyophilized product or a concentrate, the parenteral formulation would be reconstituted or diluted prior to administration. pH can be adjusted with acids or bases, such as hydrochloric acid or sodium hydroxide. Depot formulations, providing controlled or sustained release of an invention composition, may include injectable suspensions of nano/micro particles or nano/micro or non-micronized crystals.

[0428] For intravenous administration, suitable carriers include physiological saline, bacteriostatic water, Cremophor EL™ (BASF, Parsippany, N.J.) or phosphate buffered saline (PBS). In all cases, the composition must be sterile and should be fluid to the extent that easy syringability exists. It must be stable under the conditions of manufacture and storage and must be preserved against the contaminating action of microorganisms such as bacteria and fungi. The carrier can be a solvent or dispersion medium containing, for example, water, ethanol, poly(ol) (for example, glycerol, propylene glycol, and liquid polyethylene glycol, and the like), and suitable mixtures thereof. The proper fluidity can be maintained, for example, by the use of a coating such as lecithin, by the maintenance of the required particle size in the case of dispersion and by the use of surfactants.

[0429] Sterile injectable solutions can be prepared by incorporating the composition in the required amount in an appropriate solvent with one or a com-bination of ingredients enumerated above, as required, followed by filtered sterilization. Prevention of the action of micro-organisms can be achieved by various antibacterial and antifungal agents, for example, parabens, chlorobutanol, phenol, ascorbic acid, thimerosal, and the like.

[0430] Generally, dispersions are prepared by incorporating the active composition into a sterile vehicle which contains a basic dispersion medium and the required other ingredients from those enumerated above. In the case of sterile powders for the preparation of sterile injectable solutions, the preferred methods of preparation are vacuum drying and freeze-drying which yields a powder of the active ingredient plus any additional desired ingredient from a previously sterile-filtered solution thereof. In many cases, it will be preferable to include isotonic agents, for example, sugars, polyalcohols such as mannitol, sorbitol, and sodium chloride in the composition. Prolonged absorption of the injectable compositions can be brought about by including in the composition an agent which delays absorption, for example, aluminum monostearate and gelatin. The parenteral preparation can be enclosed in ampoules, disposable syringes or multiple dose vials made of glass or plastic.

[0431] For oral administration, the compositions can be formulated in liquid or solid dosage forms and as instant or controlled/sustained release formulations. Suitable dosage forms for oral ingestion by a subject include powders, tablets, pills, granules, dragees, hard- and soft-shell capsules, liquids, gels, syrups, slurries, suspensions, emulsions and the like. Oral compositions generally include an inert diluent or an edible carrier. They can be enclosed in gelatin capsules or compressed into tablets. For the purpose of oral therapeutic administration, the active agent can be incorporated with excipients and used in the form of tablets, troches, or capsules. Oral compositions can also be prepared using a fluid carrier for use as a mouthwash, wherein the agent in the fluid carrier is applied orally and swished and expectorated or swallowed. Pharmaceutically compatible binding agents, and/or adjuvant materials can be included as part of the composition. The tablets, granules, pills, capsules, troches and the like can contain any of the following ingredients, or compounds of a similar nature: a binder such as micro-crystalline cellulose, gum tragacanth or gelatin; an excipient such as starch or lactose; dissolution retardant; anti-adherents; cationic exchange resin; wetting agents; antioxidants; preservatives; a disintegrating agent such as alginic acid, Primogel, or corn starch; a lubricant such as magnesium stearate or Sterotes; a glidant such as colloidal silicon dioxide; a preservative; a colorant; a sweetening agent such as sugars such as dextrose, sucrose or saccharin; or a flavoring agent such as peppermint, methyl salicylate, or orange flavoring, each of these being synthetic and/or natural.

[0432] For administration by inhalation, e.g., intranasal administration, the compositions are delivered in the form of an aerosol spray from pressured container or dispenser which contains a suitable propellant, e.g., a gas such as carbon dioxide, or a nebulizer. Systemic administration can also be by transmucosal or trans-dermal means. For transmucosal or transdermal administration, penetrants appropriate to the barrier to be permeated are used in the formulation. Such penetrants are generally known in the art, and include, for example, for transmucosal administration, detergents, bile salts, and fusidic acid derivatives. Transmucosal administration can be accomplished through the use of nasal sprays or suppositories. For transdermal administration, the active agents are formulated into ointments, salves, gels, or creams, emulsion, a solution, a suspension, or a foam, as generally known in the art. The penetration of the drug into the skin and underlying tissues can be regulated, for example, using penetration enhancers; the appropriate choice and combination of lipophilic, hydrophilic, and amphiphilic excipients, including water, organic solvents, waxes, oils, synthetic and natural polymers, surfactants, emulsifiers; by pH adjustments; use of complexing agents and other techniques, such as iontophoresis, may be used to regulate skin penetration of the active ingredient.

[0433] The compositions may also be formulated in rectal compositions, such as suppositories (e.g., with conventional suppository bases such as cocoa butter and other glycerides) or retention enemas.

[0434] Examples of pharmaceutically or physiologically acceptable carriers, diluents or excipients include, but are not limited to, antifoaming agents, antioxidants, binders, carriers or carrier materials, dispersing agents, viscosity modulating agents, diluents, filling agents, lubricants, glidants, plasticizers, solubilizers, stabilizers, suspending agents, surfactants, viscosity enhancing agents, and wetting agents.

[0435] The separate components of the compositions of the invention may be preblended or each component may be added separately to the same environment according to a predetermined dosage for the purpose of achieving the desired concentration level of the treatment components and so long as the components eventually come into intimate admixture with each other. Further, the invention may be administered or delivered on a continuous or intermittent basis.

[0436] It is especially advantageous to formulate oral or parenteral compositions in dosage unit form for ease of administration and uniformity of dosage. Dosage unit form as used herein refers to physically discrete units suited as unitary dosages for the human subject to be treated; each unit containing a predetermined quantity of active compound calculated to produce the desired therapeutic effect in association with the required pharmaceutical carrier. The specification for the dosage unit forms of the invention is dictated by and directly dependent on the unique characteristics of the compositions and the particular therapeutic effect to be achieved, and the limitations inherent in the art of compounding such an agent for the treatment of subjects.

[0437] In some embodiments, provided herein is a method of producing the pharmaceutical formulation as described herein.

### Combination Therapies

[0438] In some embodiments, the compounds disclosed in the present disclosure can be used in combination with one or more additional therapeutic agents. In some embodiments, the one or more additional therapeutic agents can comprise a small molecule. For example, the one or more additional therapeutic agents can comprise a small molecule described in WO2016128343A1, WO2017053982A1, WO2016196386A1, WO201428459A1, WO201524876A2, WO2013119916A2, and WO2014209841A2, which are incorporated by reference herein in their entirety. In some embodiments, the one or more additional therapeutic agents comprise an ASO that can be used to correct intron retention. In some embodiments, the one or more other agents are selected from the ASOs listed in Table 8A or Table 8B.

### Treatment of Subjects

[0439] Any of the compositions provided herein may be administered to an individual. “Individual” may be used interchangeably with “subject” or “patient.” An individual may be a mammal, for example a human or animal such as a non-human primate, a rodent, a rabbit, a rat, a mouse, a horse, a donkey, a goat, a cat, a dog, a cow, a pig, or a sheep. In some embodiments, the individual is a human. In some embodiments, the individual is a fetus, an embryo, or a child. In other embodiments, the individual may be another eukaryotic organism, such as a plant. In some embodiments, the compositions provided herein are administered to a cell ex vivo.

[0440] In some embodiments, the compositions provided herein are administered to an individual as a method of treating a disease or disorder. In some embodiments, the individual has a genetic disease, such as any of the diseases described herein. In some embodiments, the individual is at risk of having a disease, such as any of the diseases described herein. In some embodiments, the individual is at increased risk of having a disease or disorder characterized by insufficient amount of a protein or insufficient activity of a protein. If an individual is “at an increased risk” of having a disease or disorder caused insufficient amount of a protein or insufficient activity of a protein, the method involves preventative or prophylactic treatment. For example, an individual may be at an increased risk of having such a disease or disorder because of family history of the disease. Typically, individuals at an increased risk of having such a disease or disorder benefit from prophylactic treatment (e.g., by preventing or delaying the onset or progression of the disease or disorder). In some embodiments, a fetus is treated in utero, e.g., by administering the composition to the fetus directly or indirectly (e.g., via the mother).

[0441] Suitable routes for administration of compounds of the present disclosure may vary depending on cell type to which delivery of the compounds is desired. Multiple tissues and organs are affected by Dravet syndrome; Epilepsy, generalized, with febrile seizures plus, type 2; Febrile seizures, familial, 3A; Migraine, familial hemiplegic, 3; Autism; Epileptic encephalopathy, early infantile, 13; Sick sinus syndrome 1; Alzheimer's disease or SUDEP, with the brain being the most significantly affected tissue. The compounds of the present disclosure may be administered to patients parenterally, for example, by intrathecal injection, intracerebroventricular injection, intraperitoneal injection, intramuscular injection, subcutaneous injection, intravitreal injection, or intravenous injection.

### Mode of Action

[0442] In some embodiments, the reduced expression or function of Na_{V}1.1 protein is associated with an altered splicing of a nonsense-mediated RNA decay-inducing exon (NMD exon) from a pre-mRNA that contains the NMD exon and that encodes Na_{V}1.1 protein. For example, the reduced expression or function of Na_{V}1.1 protein can be associated with a reduced splicing of a nonsense-mediated RNA decay-inducing exon (NMD exon) from a pre-mRNA that contains the NMD exon and that encodes Na_{V}1.1 protein.

[0443] In some embodiments, the compound as described herein promotes exclusion of the NMD exon from a pre-mRNA that contains the NMD exon and that encodes Na_{V}1.1 protein.

[0444] In some embodiments, the compound as described herein promotes exclusion of the NMD exon from a pre-mRNA that contains the NMD exon and that encodes Na_{V}1.1 protein by at least 5%, at least 10%, at least 20%, at least 30%, at least 40%, at least 50%, at least 60%, at least 70%, at least 80%, at least 90%, at least 100%, at least 200%, at least 300%, at least 400%, at least 500%, at least 600%, at least 700%, at least 800%, at least 900%, at least 1000%, at least 2000%, at least 3000%, at least 4000%, at least 5000%, at least 6000%, at least 7000%, at least 8000%, at least 9000%, at least 10000%, at least 20000%, at least 30000%, at least 40000%, at least 50000%, at least 60000%, at least 70000%, at least 80000%, at least 90000%, or at least 100000% as compared to an untreated control cell, tissue or subject, or compared to the corresponding activity in the same type of cell, tissue or subject before treatment with the compound as described herein as measured by any standard technique. In some embodiments, the compound as described herein promotes exclusion of the NMD exon a pre-mRNA that contains the NMD exon and that encodes Na_{V}1.1 protein by at least 2 fold, at least 3 fold, at least 4 fold, at least 5 fold, at least 10 fold, at least 20 fold, at least 25 fold, at least 30 fold, at least 40 fold, at least 50 fold, at least 60 fold, at least 70 fold, at least 80 fold, at least 90 fold, at least 100 fold, at least 200 fold, at least 300 fold, at least 400 fold, at least 500 fold, at least 600 fold, at least 700 fold, at least 800 fold, at least 900 fold, at least 1000 fold, at least 2000 fold, at least 3000 fold, at least 4000 fold, at least 5000 fold, at least 6000 fold, at least 7000 fold, at least 8000 fold, at least 9000 fold, or at least 10000 fold as compared to an untreated control cell, tissue or subject, or compared to the corresponding activity in the same type of cell, tissue or subject before treatment with the compound as described herein as measured by any standard technique.

[0445] In some embodiments, the compound as described herein binds to a targeted portion of a pre-mRNA that contains a nonsense-mediated RNA decay-inducing exon and that encodes Na_{V}1.1 protein.

[0446] In some embodiments, the compound as described herein promotes exclusion of a nonsense-mediated mRNA decay-inducing exon (NMD exon) from a pre-mRNA that contains the NMD exon and that encodes Na_{V}1.1 protein.

[0447] In some embodiments, the compound as described herein promotes exclusion of an NMD exon from a pre-mRNA that contains the NMD exon and that encodes Na_{V}1.1 protein by at least 5%, at least 10%, at least 20%, at least 30%, at least 40%, at least 50%, at least 60%, at least 70%, at least 80%, at least 90%, at least 100%, at least 200%, at least 300%, at least 400%, at least 500%, at least 600%, at least 700%, at least 800%, at least 900%, at least 1000%, at least 2000%, at least 3000%, at least 4000%, at least 5000%, at least 6000%, at least 7000%, at least 8000%, at least 9000%, at least 10000%, at least 20000%, at least 30000%, at least 40000%, at least 50000%, at least 60000%, at least 70000%, at least 80000%, at least 90000%, or at least 100000% as compared to an untreated control cell, tissue or subject, or compared to the corresponding activity in the same type of cell, tissue or subject before treatment with the compound as described herein as measured by any standard technique. In some embodiments, the compound as described herein promotes exclusion of an NMD exon from a pre-mRNA that contains the NMD exon and that encodes Na_{V}1.1 protein by at least 2 fold, at least 3 fold, at least 4 fold, at least 5 fold, at least 10 fold, at least 20 fold, at least 25 fold, at least 30 fold, at least 40 fold, at least 50 fold, at least 60 fold, at least 70 fold, at least 80 fold, at least 90 fold, at least 100 fold, at least 200 fold, at least 300 fold, at least 400 fold, at least 500 fold, at least 600 fold, at least 700 fold, at least 800 fold, at least 900 fold, at least 1000 fold, at least 2000 fold, at least 3000 fold, at least 4000 fold, at least 5000 fold, at least 6000 fold, at least 7000 fold, at least 8000 fold, at least 9000 fold, or at least 10000 fold as compared to an untreated control cell, tissue or subject, or compared to the corresponding activity in the same type of cell, tissue or subject before treatment with the compound as described herein as measured by any standard technique.

[0448] In some embodiments, the compound as described herein increases a level of processed mRNA encoding the Na_{V}1.1 protein in a cell having a pre-mRNA that contains an NMD exon and that encodes Na_{V}1.1 protein when the compound as described herein (e.g., compound (I) or a salt thereof, or compound (II)) is introduced into the cell.

[0449] In some embodiments, when the compound as described herein (e.g., compound (I) or a salt thereof, or compound (II)) is introduced into the cell, the compound as described herein increases a level of processed mRNA encoding the Na_{V}1.1 protein in a cell having a pre-mRNA that contains an NMD exon and that encodes Na_{V}1.1 protein by at least 5%, at least 10%, at least 20%, at least 30%, at least 40%, at least 50%, at least 60%, at least 70%, at least 80%, at least 90%, at least 100%, at least 200%, at least 300%, at least 400%, at least 500%, at least 600%, at least 700%, at least 800%, at least 900%, at least 1000%, at least 2000%, at least 3000%, at least 4000%, at least 5000%, at least 6000%, at least 7000%, at least 8000%, at least 9000%, at least 10000%, at least 20000%, at least 30000%, at least 40000%, at least 50000%, at least 60000%, at least 70000%, at least 80000%, at least 90000%, or at least 100000% as compared to an untreated control cell, tissue or subject, or compared to the corresponding activity in the same type of cell, tissue or subject before treatment with the compound as described herein as measured by any standard technique. In some embodiments, when the compound as described herein (e.g., compound (I) or a salt thereof, or compound (II)) is introduced into the cell, the compound as described herein increases a level of processed mRNA encoding the Na_{V}1.1 protein in a cell having a pre-mRNA that contains an NMD exon and that encodes Na_{V}1.1 protein by at least 2 fold, at least 3 fold, at least 4 fold, at least 5 fold, at least 10 fold, at least 20 fold, at least 25 fold, at least 30 fold, at least 40 fold, at least 50 fold, at least 60 fold, at least 70 fold, at least 80 fold, at least 90 fold, at least 100 fold, at least 200 fold, at least 300 fold, at least 400 fold, at least 500 fold, at least 600 fold, at least 700 fold, at least 800 fold, at least 900 fold, at least 1000 fold, at least 2000 fold, at least 3000 fold, at least 4000 fold, at least 5000 fold, at least 6000 fold, at least 7000 fold, at least 8000 fold, at least 9000 fold, or at least 10000 fold as compared to an untreated control cell, tissue or subject, or compared to the corresponding activity in the same type of cell, tissue or subject before treatment with the compound as described herein as measured by any standard technique.

[0450] In some embodiments, the compound as described herein increases a level of the Na_{V}1.1 protein in a cell having a pre-mRNA that contains an NMD exon and that encodes Na_{V}1.1 protein when the compound as described herein (e.g., compound (I) or a salt thereof, or compound (II)) is introduced into the cell.

[0451] In some embodiments, when the compound as described herein (e.g., compound (I) or a salt thereof, or compound (II)) is introduced into the cell, the compound as described herein increases a level of the Na_{V}1.1 protein in a cell having a pre-mRNA that contains an NMD exon and that encodes Na_{V}1.1 protein by at least 5%, at least 10%, at least 20%, at least 30%, at least 40%, at least 50%, at least 60%, at least 70%, at least 80%, at least 90%, at least 100%, at least 200%, at least 300%, at least 400%, at least 500%, at least 600%, at least 700%, at least 800%, at least 900%, at least 1000%, at least 2000%, at least 3000%, at least 4000%, at least 5000%, at least 6000%, at least 7000%, at least 8000%, at least 9000%, at least 10000%, at least 20000%, at least 30000%, at least 40000%, at least 50000%, at least 60000%, at least 70000%, at least 80000%, at least 90000%, or at least 100000% as compared to an untreated control cell, tissue or subject, or compared to the corresponding activity in the same type of cell, tissue or subject before treatment with the compound as described herein as measured by any standard technique. In some embodiments, when the compound as described herein (e.g., compound (I) or a salt thereof, or compound (II)) is introduced into the cell, the compound as described herein increases a level of the Na_{V}1.1 protein in a cell having a pre-mRNA that contains an NMD exon and that encodes Na_{V}1.1 protein by at least 2 fold, at least 3 fold, at least 4 fold, at least 5 fold, at least 10 fold, at least 20 fold, at least 25 fold, at least 30 fold, at least 40 fold, at least 50 fold, at least 60 fold, at least 70 fold, at least 80 fold, at least 90 fold, at least 100 fold, at least 200 fold, at least 300 fold, at least 400 fold, at least 500 fold, at least 600 fold, at least 700 fold, at least 800 fold, at least 900 fold, at least 1000 fold, at least 2000 fold, at least 3000 fold, at least 4000 fold, at least 5000 fold, at least 6000 fold, at least 7000 fold, at least 8000 fold, at least 9000 fold, or at least 10000 fold as compared to an untreated control cell, tissue or subject, or compared to the corresponding activity in the same type of cell, tissue or subject before treatment with the compound as described herein as measured by any standard technique.

[0452] In some embodiments, the targeted portion is within an intron sequence flanking the NMD exon.

[0453] In some embodiments, the targeted portion comprises at least one nucleotide of the NMD exon.

[0454] In some embodiments, the targeted portion comprises at least 1, 2, 3, 4, 5, 6, 7, 8, 9, 10, 11, 12, 13, 14, 15, 16, 17, 18, 19, 20, 21, 22, 23, 24, 25, 26, 27, 28, 29, 30, 31, 32, 33, 34, 35, 36, 37, 38, 39, 40, 41, 42, 43, 44, 45, 46, 47, 48, or 49 nucleotide of the NMD exon. In some embodiments, the targeted portion comprises at most 1, 2, 3, 4, 5, 6, 7, 8, 9, 10, 11, 12, 13, 14, 15, 16, 17, 18, 19, 20, 21, 22, 23, 24, 25, 26, 27, 28, 29, 30, 31, 32, 33, 34, 35, 36, 37, 38, 39, 40, 41, 42, 43, 44, 45, 46, 47, 48, or 49 nucleotide of the NMD exon.

[0455] In some embodiments, the targeted portion is within the NMD exon.

[0456] In some embodiments, the NMD exon comprises a sequence with at least 80%, at least 90%, or 100% sequence identity to a sequence selected from the group consisting of the sequences listed in Table 1 or Table 2. In some embodiments, the NMD exon comprises a sequence selected from the group consisting of the sequences listed in Table 1 or Table 2. In some embodiments, the pre-mRNA comprises a sequence with at least about 80%, 85%, 90%, 95%, 97%, or 100% sequence identity to a sequence selected from the group consisting of the sequences listed in Table 1 or Table 2. In some embodiments, the pre-mRNA is encoded by a genetic sequence with at least about 80%, 85%, 90%, 95%, 97%, or 100% sequence identity to a sequence selected from the group consisting of the sequences listed in Table 1 or Table 2. Splicing and Nonsense-Mediated mRNA Decay

[0457] Intervening sequences or introns are removed by a large and highly dynamic RNA-protein complex termed the spliceosome, which orchestrates complex interactions between primary transcripts, small nuclear RNAs (snRNAs) and a large number of proteins. Spliceosomes assemble ad hoc on each intron in an ordered manner, starting with recognition of 5′ splice site (5′ss) by U1 snRNA or 3′ splice site (3′ss) by the U2 pathway, which involves binding of the U2 auxiliary factor (U2AF) to 3′ss region to facilitate U2 binding to the branch point sequence (BPS). U2AF is a stable heterodimer composed of a U2AF2-encoded 65-kD subunit (U2AF65), which binds the polypyrimidine tract (PPT), and a U2AF1-encoded 35-kD subunit (U2AF35), which interacts with highly conserved AG dinucleotides at 3′ss and stabilizes U2AF65 binding. In addition to the BPS/PPT unit and 3′ss/5′ss, accurate splicing requires auxiliary sequences or structures that activate or repress splice site recognition, known as intronic or exonic splicing enhancers or silencers. These elements allow genuine splice sites to be recognized among a vast excess of cryptic or pseudo-sites in the genome of higher eukaryotes, which have the same sequences but outnumber authentic sites by an order of magnitude. Although they often have a regulatory function, the exact mechanisms of their activation or repression are poorly understood.

[0458] The decision of whether to splice or not to splice can be typically modeled as a stochastic rather than deterministic process, such that even the most defined splicing signals can sometimes splice incorrectly. However, under normal conditions, pre-mRNA splicing proceeds at surprisingly high fidelity. This is attributed in part to the activity of adjacent cis-acting auxiliary exonic and intronic splicing regulatory elements (ESRs or ISRs). Typically, these functional elements are classified as either exonic or intronic splicing enhancers (ESEs or ISEs) or silencers (ESSs or ISSs) based on their ability to stimulate or inhibit splicing, respectively. Although there is now evidence that some auxiliary cis-acting elements may act by influencing the kinetics of spliceosome assembly, such as the arrangement of the complex between U1 snRNP and 5′ss, it seems very likely that many elements function in concert with trans-acting RNA-binding proteins (RBPs). For example, the serine- and arginine-rich family of RBPs (SR proteins) is a conserved family of proteins that have a key role in defining exons. SR proteins promote exon recognition by recruiting components of the pre-spliceosome to adjacent splice sites or by antagonizing the effects of ESSs in the vicinity. The repressive effects of ESSs can be mediated by members of the heterogeneous nuclear ribonucleoprotein (hnRNP) family and can alter recruitment of core splicing factors to adjacent splice sites. In addition to their roles in splicing regulation, silencer elements are suggested to have a role in repression of pseudo-exons, sets of decoy intronic splice sites with the typical spacing of an exon but without a functional open reading frame. ESEs and ESSs, in cooperation with their cognate trans-acting RBPs, represent important components in a set of splicing controls that specify how, where and when mRNAs are assembled from their precursors.

[0459] The sequences marking the exon-intron boundaries are degenerate signals of varying strengths that can occur at high frequency within human genes. In multi-exon genes, different pairs of splice sites can be linked together in many different combinations, creating a diverse array of transcripts from a single gene. This is commonly referred to as alternative pre-mRNA splicing. Although most mRNA isoforms produced by alternative splicing can be exported from the nucleus and translated into functional polypeptides, different mRNA isoforms from a single gene can vary greatly in their translation efficiency. Those mRNA isoforms with premature termination codons (PTCs) at least 50 bp upstream of an exon junction complex are likely to be targeted for degradation by the nonsense-mediated mRNA decay (NMD) pathway. Mutations in traditional (BPS/PPT/3′ss/5′ss) and auxiliary splicing motifs can cause aberrant splicing, such as exon skipping or cryptic (or pseudo-) exon inclusion or splice-site activation, and contribute significantly to human morbidity and mortality. Both aberrant and alternative splicing patterns can be influenced by natural DNA variants in exons and introns.

[0460] Given that exon-intron boundaries can occur at any of the three positions of a codon, it is clear that only a subset of alternative splicing events can maintain the canonical open reading frame. For example, only exons that are evenly divisible by 3 can be skipped or included in the mRNA without any alteration of reading frame. Splicing events that do not have compatible phases will induce a frame-shift. Unless reversed by downstream events, frame-shifts can certainly lead to one or more PTCs, probably resulting in subsequent degradation by NMD. NMD is a translation-coupled mechanism that eliminates mRNAs containing PTCs. NMD can function as a surveillance pathway that exists in all eukaryotes. NMD can reduce errors in gene expression by eliminating mRNA transcripts that contain premature stop codons. Translation of these aberrant mRNAs could, in some cases, lead to deleterious gain-of-function or dominant-negative activity of the resulting proteins. NMD targets not only transcripts with PTCs but also a broad array of mRNA isoforms expressed from many endogenous genes, suggesting that NMD is a master regulator that drives both fine and coarse adjustments in steady-state RNA levels in the cell.

[0461] An NMD-inducing exon (NIE) is an exon or a pseudo-exon that is a region within an intron and can activate the NMD pathway if included in a mature RNA transcript. In the constitutive splicing events, the intron containing an NIE is usually spliced out, but the intron or a portion thereof (e.g., NIE) can be retained during alternative or aberrant splicing events. Mature mRNA transcripts containing such an NIE can be non-productive due to frame shift which induce NMD pathway. Inclusion of a NIE in mature RNA transcripts can downregulate gene expression. mRNA transcripts, such as a pre-mRNA transcript, containing an NIE can be referred as “NIE containing mRNA” or “NMD exon mRNA” in the current disclosure.

[0462] Cryptic (or pseudo-splice sites) have the same splicing recognition sequences as genuine splice sites but are not used in the splicing reactions. They outnumber genuine splice sites in the human genome by an order of a magnitude and are normally repressed by thus far poorly understood molecular mechanisms. Cryptic 5′ splice sites have the consensus NNN/GUNNNN or NNN/GCNNNN where N is any nucleotide and/is the exon-intron boundary. Cryptic 3′ splice sites have the consensus NAG/N. Their activation is positively influenced by surrounding nucleotides that make them more similar to the optimal consensus of authentic splice sites, namely MAG/GURAGU and YAG/G, respectively, where M is C or A, R is G or A, and Y is C or U.

[0463] Splice sites and their regulatory sequences can be readily identified by a skilled person using suitable algorithms publicly available, listed for example in Kralovicova, J. and Vorechovsky, I. (2007) Global control of aberrant splice site activation by auxiliary splicing sequences: evidence for a gradient in exon and intron definition. Nucleic Acids Res., 35, 6399-6413, (http://www.ncbi.nlm.nih.gov/pmc/articles/PMC2095810/pdf/gkm680.pdf)

[0464] The cryptic splice sites or splicing regulatory sequences may compete for RNA-binding proteins such as U2AF with a splice site of the NIE. In one embodiment, an agent may bind to the cryptic splice site or splicing regulatory sequences to prevent the binding of RNA-binding proteins and thereby favoring utilization of the NIE splice sites.

[0465] In one embodiment, the cryptic splice site may not comprise 5′ or 3′ splice site of the NIE. The cryptic splice site may be at least 10 nucleotides upstream of the NIE 5′ splice site. The cryptic splice site may be at least 20 nucleotides upstream of the NIE 5′ splice site. The cryptic splice site may be at least 50 nucleotides upstream of the NIE 5′ splice site. The cryptic splice site may be at least 100 nucleotides upstream of the NIE 5′ splice site. The cryptic splice site may be at least 200 nucleotides upstream of the NIE 5′ splice site.

[0466] The cryptic splice site may be at least 10 nucleotides downstream of the NIE 3′ splice site. The cryptic splice site may be at least 20 nucleotides downstream of the NIE 3′ splice site. The cryptic splice site may be at least 50 nucleotides downstream of the NIE 3′ splice site. The cryptic splice site may be at least 100 nucleotides downstream of the NIE 3′ splice site. The cryptic splice site may be at least 200 nucleotides downstream of the NIE 3′ splice site.

[0467] In some embodiments, the methods of the present disclosure exploit the presence of NIE in the pre-mRNA transcribed from the SCN1A gene. Splicing of the identified SCN1A NIE pre-mRNA species to produce functional mature Scn1a mRNA can be induced using a therapeutic agent such as an ASO that stimulates exon skipping of an NIE. Induction of exon skipping can result in inhibition of an NMD pathway. The resulting mature Scn1a mRNA can be translated normally without activating NMD pathway, thereby increasing the amount of Na_{V}1.1 (also termed “Na_{V}1.1 protein” herein) in the patient's cells and alleviating symptoms of a condition associated with SCN1A deficiency, such as Dravet Syndrome (DS); Epilepsy, generalized, with febrile seizures plus, type 2; Febrile seizures, familial, 3A; Autism; Epileptic encephalopathy, early infantile, 13; Sick sinus syndrome 1; Alzheimer's disease; or SUDEP.

[0468] Where reference is made to reducing NIE inclusion in the mature mRNA, the reduction may be complete, e.g., 100%, or may be partial. The reduction may be clinically significant. The reduction/correction may be relative to the level of NIE inclusion in the human subject without treatment, or relative to the amount of NIE inclusion in a population of similar subjects. The reduction/correction may be at least 10% less NIE inclusion relative to the average subject, or the human subject prior to treatment. The reduction may be at least 20% less NIE inclusion relative to an average subject, or the human subject prior to treatment. The reduction may be at least 40% less NIE inclusion relative to an average subject, or the human subject prior to treatment. The reduction may be at least 50% less NIE inclusion relative to an average subject, or the human subject prior to treatment. The reduction may be at least 60% less NIE inclusion relative to an average subject, or the human subject prior to treatment. The reduction may be at least 80% less NIE inclusion relative to an average subject, or the human subject prior to treatment. The reduction may be at least 90% less NIE inclusion relative to an average subject, or the human subject prior to treatment.

[0469] Where reference is made to increasing active-Na_{V}1.1 protein levels, the increase may be clinically significant. The increase may be relative to the level of active-Na_{V}1.1 protein in the human subject without treatment, or relative to the amount of active-Na_{V}1.1 protein in a population of similar subjects. The increase may be at least 10% more active-Na_{V}1.1 protein relative to the average subject, or the human subject prior to treatment. The increase may be at least 20% more active-Na_{V}1.1 protein relative to the average subject, or the human subject prior to treatment. The increase may be at least 40% more active-Na_{V}1.1 protein relative to the average subject, or the human subject prior to treatment. The increase may be at least 50% more active-Na_{V}1.1 protein relative to the average subject, or the human subject prior to treatment. The increase may be at least 80% more active-Na_{V}1.1 protein relative to the average subject, or the human subject prior to treatment. The increase may be at least 100% more active-Na_{V}1.1 protein relative to the average subject, or the human subject prior to treatment. The increase may be at least 200% more active-Na_{V}1.1 protein relative to the average subject, or the human subject prior to treatment. The increase may be at least 500% more active-Na_{V}1.1 protein relative to the average subject, or the human subject prior to treatment.

### Exon Inclusion

[0470] As used herein, a “NIE containing pre-mRNA” is a pre-mRNA transcript that contains at least one pseudo-exon. Alternative or aberrant splicing can result in inclusion of the at least one pseudo-exon in the mature mRNA transcripts. The terms “mature mRNA,” and “fully-spliced mRNA,” are used interchangeably here-in to describe a fully processed mRNA. Inclusion of the at least one pseudo-exon can be non-productive mRNA and lead to NMD of the mature mRNA. NIE containing mature mRNA may sometimes lead to aberrant protein expression.

[0471] One of skill in the art also can determine the sequences of flanking exons in any SCN1A isoform for targeting using the methods of the disclosure, based on an intron sequence provided herein or using the intron number provided in reference to the mRNA sequence at NM_006920, NM_001202435, NM_001165964, or NM_001165963.

[0472] In some embodiments, the methods and compositions of the present disclosure are used to modulate, e.g., increase or decrease, the expression of SCN1A by inducing or inhibiting exon skipping of a pseudo-exon of an SCN1A NIE containing pre-mRNA. In some embodiments, the pseudo-exon is a sequence within any of introns 1-25. In some embodiments, the pseudo-exon is a sequence within any of introns 2, 4, 6, 13, 14, 15, 16, 17, 18, 20, 21, 22, 23, 24, and 25. In some embodiments, the pseudo-exon is a sequence within any of introns 15, 18, and 19. In some embodiments, the pseudo-exon can be any SCN1A intron or a portion thereof. In some embodiments, the pseudo-exon is within intron 20. The SCN1A intron numbering used herein corresponds to the mRNA sequence at NM_006920. It is understood that the intron numbering may change in reference to a different SCN1A isoform sequence.

[0473] In some embodiments, the included pseudo-exon is the most abundant pseudo-exon in a population of NIE containing pre-mRNAs transcribed from the gene encoding the target protein in a cell. In some embodiments, the included pseudo-exon is the most abundant pseudo-exon in a population of NIE containing pre-mRNAs transcribed from the gene encoding the target protein in a cell, where-in the population of NIE containing pre-mRNAs comprises two or more included pseudo-exons. In some embodiments, an antisense oligomer targeted to the most abundant pseudo-exon in the population of NIE containing pre-mRNAs encoding the target protein induces exon skipping of one or two or more pseudo-exons in the population, including the pseudo-exon to which the antisense oligomer is targeted or binds. In some embodiments, the targeted region is in a pseudo-exon that is the most abundant pseudo-exon in a NIE containing pre-mRNA encoding the Na_{V}1.1 protein.

[0474] The degree of exon inclusion can be expressed as percent exon inclusion, e.g., the percentage of transcripts in which a given pseudo-exon is included. In brief, percent exon inclusion can be calculated as the percentage of the amount of RNA transcripts with the exon inclusion, over the sum of the average of the amount of RNA transcripts with exon inclusion plus the average of the amount of RNA transcripts with exon exclusion.

[0475] In some embodiments, an included pseudo-exon is an exon that is identified as an included pseudo-exon based on a determination of at least about 5%, at least about 10%, at least about 15%, at least about 20%, at least about 25%, at least about 30%, at least about 35%, at least about 40%, at least about 45%, or at least about 50%, inclusion. In some embodiments, a included pseudo-exon is an exon that is identified as a included pseudo-exon based on a determination of about 5% to about 100%, about 5% to about 95%, about 5% to about 90%, about 5% to about 85%, about 5% to about 80%, about 5% to about 75%, about 5% to about 70%, about 5% to about 65%, about 5% to about 60%, about 5% to about 55%, about 5% to about 50%, about 5% to about 45%, about 5% to about 40%, about 5% to about 35%, about 5% to about 30%, about 5% to about 25%, about 5% to about 20%, about 5% to about 15%, about 10% to about 100%, about 10% to about 95%, about 10% to about 90%, about 10% to about 85%, about 10% to about 80%, about 10% to about 75%, about 10% to about 70%, about 10% to about 65%, about 10% to about 60%, about 10% to about 55%, about 10% to about 50%, about 10% to about 45%, about 10% to about 40%, about 10% to about 35%, about 10% to about 30%, about 10% to about 25%, about 10% to about 20%, about 15% to about 100%, about 15% to about 95%, about 15% to about 90%, about 15% to about 85%, about 15% to about 80%, about 15% to about 75%, about 15% to about 70%, about 15% to about 65%, about 15% to about 60%, about 15% to about 55%, about 15% to about 50%, about 15% to about 45%, about 15% to about 40%, about 15% to about 35%, about 15% to about 30%, about 15% to about 25%, about 20% to about 100%, about 20% to about 95%, about 20% to about 90%, about 20% to about 85%, about 20% to about 80%, about 20% to about 75%, about 20% to about 70%, about 20% to about 65%, about 20% to about 60%, about 20% to about 55%, about 20% to about 50%, about 20% to about 45%, about 20% to about 40%, about 20% to about 35%, about 20% to about 30%, about 25% to about 100%, about 25% to about 95%, about 25% to about 90%, about 25% to about 85%, about 25% to about 80%, about 25% to about 75%, about 25% to about 70%, about 25% to about 65%, about 25% to about 60%, about 25% to about 55%, about 25% to about 50%, about 25% to about 45%, about 25% to about 40%, or about 25% to about 35%, inclusion. ENCODE data (described by, e.g., Tilgner, et al., 2012, “Deep sequencing of subcellular RNA fractions shows splicing to be predominantly co-transcriptional in the human genome but inefficient for lncRNAs,” Genome Research 22 (9): 1616-25, of which entire content is incorporated herein by reference) can be used to aid in identifying exon inclusion.

[0476] In some embodiments, contacting cells with an ASO that is complementary to a targeted portion of a SCN1A pre-mRNA transcript results in an increase in the amount of Na_{V}1.1 protein produced by at least 10, 20, 30, 40, 50, 60, 80, 100, 150, 200, 250, 300, 350, 400, 450, 500, or 1000%, compared to the amount of the protein produced by a cell in the absence of the ASO/absence of treatment. In some embodiments, the total amount of Na_{V}1.1 protein produced by the cell to which the antisense oligomer is contacted is increased about 1.1 to about 10-fold, about 1.5 to about 10-fold, about 2 to about 10-fold, about 3 to about 10-fold, about 4 to about 10-fold, about 1.1 to about 5-fold, about 1.1 to about 6-fold, about 1.1 to about 7-fold, about 1.1 to about 8-fold, about 1.1 to about 9-fold, about 2 to about 5-fold, about 2 to about 6-fold, about 2 to about 7-fold, about 2 to about 8-fold, about 2 to about 9-fold, about 3 to about 6-fold, about 3 to about 7-fold, about 3 to about 8-fold, about 3 to about 9-fold, about 4 to about 7-fold, about 4 to about 8-fold, about 4 to about 9-fold, at least about 1.1-fold, at least about 1.5-fold, at least about 2-fold, at least about 2.5-fold, at least about 3-fold, at least about 3.5-fold, at least about 4-fold, at least about 5-fold, or at least about 10-fold, compared to the amount of target protein produced by a control compound. A control compound can be, for example, an oligonucleotide that is not complementary to a targeted portion of the pre-mRNA.

[0477] In some embodiments, contacting cells with an ASO that is complementary to a targeted portion of a SCN1A pre-mRNA transcript results in a decrease in the amount of Na_{V}1.1 protein produced by at least 10, 20, 30, 40, 50, 60, 80, 100, 150, 200, 250, 300, 350, 400, 450, 500, or 1000%, compared to the amount of the protein produced by a cell in the absence of the ASO/absence of treatment. In some embodiments, the total amount of Na_{V}1.1 protein produced by the cell to which the antisense oligomer is contacted is decreased about 1.1 to about 10-fold, about 1.5 to about 10-fold, about 2 to about 10-fold, about 3 to about 10-fold, about 4 to about 10-fold, about 1.1 to about 5-fold, about 1.1 to about 6-fold, about 1.1 to about 7-fold, about 1.1 to about 8-fold, about 1.1 to about 9-fold, about 2 to about 5-fold, about 2 to about 6-fold, about 2 to about 7-fold, about 2 to about 8-fold, about 2 to about 9-fold, about 3 to about 6-fold, about 3 to about 7-fold, about 3 to about 8-fold, about 3 to about 9-fold, about 4 to about 7-fold, about 4 to about 8-fold, about 4 to about 9-fold, at least about 1.1-fold, at least about 1.5-fold, at least about 2-fold, at least about 2.5-fold, at least about 3-fold, at least about 3.5-fold, at least about 4-fold, at least about 5-fold, or at least about 10-fold, compared to the amount of target protein produced by a control compound. A control compound can be, for example, an oligonucleotide that is not complementary to a targeted portion of the pre-mRNA.

[0478] In some embodiments, contacting cells with an ASO that is complementary to a targeted portion of a SCN1A pre-mRNA transcript results in an increase in the amount of mRNA encoding SCN1A, including the mature mRNA encoding the target protein. In some embodiments, the amount of mRNA encoding Na_{V}1.1 protein, or the mature mRNA encoding the Na_{V}1.1 protein, is increased by at least 10, 20, 30, 40, 50, 60, 80, 100, 150, 200, 250, 300, 350, 400, 450, 500, or 1000%, compared to the amount of the protein produced by a cell in the absence of the ASO/absence of treatment. In some embodiments, the total amount of the mRNA encoding Na_{V}1.1 protein, or the mature mRNA encoding Na_{V}1.1 protein produced in the cell to which the antisense oligomer is contacted is increased about 1.1 to about 10-fold, about 1.5 to about 10-fold, about 2 to about 10-fold, about 3 to about 10-fold, about 4 to about 10-fold, about 1.1 to about 5-fold, about 1.1 to about 6-fold, about 1.1 to about 7-fold, about 1.1 to about 8-fold, about 1.1 to about 9-fold, about 2 to about 5-fold, about 2 to about 6-fold, about 2 to about 7-fold, about 2 to about 8-fold, about 2 to about 9-fold, about 3 to about 6-fold, about 3 to about 7-fold, about 3 to about 8-fold, about 3 to about 9-fold, about 4 to about 7-fold, about 4 to about 8-fold, about 4 to about 9-fold, at least about 1.1-fold, at least about 1.5-fold, at least about 2-fold, at least about 2.5-fold, at least about 3-fold, at least about 3.5-fold, at least about 4-fold, at least about 5-fold, or at least about 10-fold compared to the amount of mature RNA produced in an untreated cell, e.g., an untreated cell or a cell treated with a control compound. A control compound can be, for example, an oligonucleotide that is not complementary to a targeted portion of the SCN1A NIE containing pre-mRNA.

[0479] In some embodiments, contacting cells with an ASO that is complementary to a targeted portion of a SCN1A pre-mRNA transcript results in a decrease in the amount of mRNA encoding SCN1A, including the mature mRNA encoding the target protein. In some embodiments, the amount of mRNA encoding Na_{V}1.1 protein, or the mature mRNA encoding the Na_{V}1.1 protein, is decreased by at least 10, 20, 30, 40, 50, 60, 80, 100, 150, 200, 250, 300, 350, 400, 450, 500, or 1000%, compared to the amount of the protein produced by a cell in the absence of the ASO/absence of treatment. In some embodiments, the total amount of the mRNA encoding Na_{V}1.1 protein, or the mature mRNA encoding Na_{V}1.1 protein produced in the cell to which the antisense oligomer is contacted is decreased about 1.1 to about 10-fold, about 1.5 to about 10-fold, about 2 to about 10-fold, about 3 to about 10-fold, about 4 to about 10-fold, about 1.1 to about 5-fold, about 1.1 to about 6-fold, about 1.1 to about 7-fold, about 1.1 to about 8-fold, about 1.1 to about 9-fold, about 2 to about 5-fold, about 2 to about 6-fold, about 2 to about 7-fold, about 2 to about 8-fold, about 2 to about 9-fold, about 3 to about 6-fold, about 3 to about 7-fold, about 3 to about 8-fold, about 3 to about 9-fold, about 4 to about 7-fold, about 4 to about 8-fold, about 4 to about 9-fold, at least about 1.1-fold, at least about 1.5-fold, at least about 2-fold, at least about 2.5-fold, at least about 3-fold, at least about 3.5-fold, at least about 4-fold, at least about 5-fold, or at least about 10-fold compared to the amount of mature RNA produced in an untreated cell, e.g., an untreated cell or a cell treated with a control compound. A control compound can be, for example, an oligonucleotide that is not complementary to a targeted portion of the SCN1A NIE containing pre-mRNA.

[0480] The NIE can be in any length. In some embodiments, the NIE comprises a full sequence of an intron, in which case, it can be referred to as intron retention. In some embodiments, the NIE can be a portion of the intron. In some embodiments, the NIE can be a 5′ end portion of an intron including a 5′ss sequence. In some embodiments, the NIE can be a 3′ end portion of an intron including a 3′ss sequence. In some embodiments, the NIE can be a portion within an intron without inclusion of a 5′ss sequence. In some embodiments, the NIE can be a portion within an intron without inclusion of a 3′ss sequence. In some embodiments, the NIE can be a portion within an intron without inclusion of either a 5′ss or a 3′ss sequence. In some embodiments, the NIE can be from 5 nucleotides to 10 nucleotides in length, from 10 nucleotides to 15 nucleotides in length, from 15 nucleotides to 20 nucleotides in length, from 20 nucleotides to 25 nucleotides in length, from 25 nucleotides to 30 nucleotides in length, from 30 nucleotides to 35 nucleotides in length, from 35 nucleotides to 40 nucleotides in length, from 40 nucleotides to 45 nucleotides in length, from 45 nucleotides to 50 nucleotides in length, from 50 nucleotides to 55 nucleotides in length, from 55 nucleotides to 60 nucleotides in length, from 60 nucleotides to 65 nucleotides in length, from 65 nucleotides to 70 nucleotides in length, from 70 nucleotides to 75 nucleotides in length, from 75 nucleotides to 80 nucleotides in length, from 80 nucleotides to 85 nucleotides in length, from 85 nucleotides to 90 nucleotides in length, from 90 nucleotides to 95 nucleotides in length, or from 95 nucleotides to 100 nucleotides in length. In some embodiments, the NIE can be at least 10 nucleotides, at least 20 nucleotides, at least 30 nucleotides, at least 40 nucleotides, at least 50 nucleotides, at least 60 nucleoids, at least 70 nucleotides, at least 80 nucleotides in length, at least 90 nucleotides, or at least 100 nucleotides in length. In some embodiments, the NIE can be from 100 to 200 nucleotides in length, from 200 to 300 nucleotides in length, from 300 to 400 nucleotides in length, from 400 to 500 nucleotides in length, from 500 to 600 nucleotides in length, from 600 to 700 nucleotides in length, from 700 to 800 nucleotides in length, from 800 to 900 nucleotides in length, from 900 to 1,000 nucleotides in length. In some embodiments, the NIE may be longer than 1,000 nucleotides in length.

[0481] Inclusion of a pseudo-exon can lead to a frameshift and the introduction of a premature termination codon (PIC) in the mature mRNA transcript rendering the transcript a target of NMD. Mature mRNA transcript containing NIE can be non-productive mRNA transcript which does not lead to protein expression. The PIC can be present in any position downstream of an NIE. In some embodiments, the PIC can be present in any exon downstream of an NIE. In some embodiments, the PIC can be present within the NIE. For example, inclusion of exon 20x in an mRNA transcript encoded by the SCN1A gene can induce a PIC in the mRNA transcript, e.g., a PIC in exon 21 of the mRNA transcript.

[0482] ASOs that when hybridized to a region of a pre-mRNA result in exon skipping (or enhanced splicing of the intron containing a NIE) and increased protein production may be tested in vivo using animal models, for example transgenic mouse models in which the full-length human gene has been knocked-in or in humanized mouse models of disease. Suitable routes for administration of ASOs may vary depending on the disease and/or the cell types to which delivery of the ASOs is desired. ASOs may be administered, for example, by intrathecal injection, intracerebroventricular injection, intraperitoneal injection, intramuscular injection, subcutaneous injection, intravitreal injection, or intravenous injection. Following administration, the cells, tissues, and/or organs of the model animals may be assessed to determine the effect of the treatment by for example evaluating splicing (efficiency, rate, extent) and protein production by methods known in the art and described herein. The animal models may also be any phenotypic or behavioral indication of the disease or disease severity.

[0483] In some embodiments, the compound (e.g., ASO) is administered with one or more agents capable of promoting penetration of the human subject compound across the blood-brain barrier by any method known in the art. For example, delivery of agents by administration of an adenovirus vector to motor neurons in muscle tissue is described in U.S. Pat. No. 6,632,427, “Adenoviral-vector-mediated gene transfer into medullary motor neurons,” incorporated herein by reference. Delivery of vectors directly to the brain, e.g., the striatum, the thalamus, the hippocampus, or the substantia nigra, is described, e.g., in U.S. Pat. No. 6,756,523, “Adenovirus vectors for the transfer of foreign genes into cells of the central nervous system particularly in brain,” incorporated herein by reference.

[0484] In some embodiments, the compounds (e.g., ASOs) are linked or conjugated with agents that provide desirable pharmaceutical or pharmacodynamic properties. In some embodiments, the compound is coupled to a substance, known in the art to promote penetration or transport across the blood-brain barrier, e.g., an antibody to the transferrin receptor. In some embodiments, the compound is linked with a viral vector, e.g., to render the antisense compound more effective or increase transport across the blood-brain barrier. In some embodiments, osmotic blood brain barrier disruption is assisted by infusion of sugars, e.g., meso erythritol, xylitol, D(+) galactose, D(+) lactose, D(+) xylose, dulcitol, myo-inositol, L(−) fructose, D(−) mannitol, D(+) glucose, D(+) arabinose, D(−) arabinose, cellobiose, D(+) maltose, D(+) raffinose, L(+) rhamnose, D(+) melibiose, D(−) ribose, adonitol, D(+) arabitol, L(−) arabitol, D(+) fucose, L(−) fucose, D(−) lyxose, L(+) lyxose, and L(−) lyxose, or amino acids, e.g., glutamine, lysine, arginine, asparagine, aspartic acid, cysteine, glutamic acid, glycine, histidine, leucine, methionine, phenylalanine, proline, serine, threonine, tyrosine, valine, and taurine. Methods and materials for enhancing blood brain barrier penetration are described, e.g., in U.S. Pat. No. 9,193,969, “Compositions and methods for selective delivery of oligonucleotide molecules to specific neuron types,” U.S. Pat. No. 4,866,042, “Method for the delivery of genetic material across the blood brain barrier,” U.S. Pat. No. 6,294,520, “Material for passage through the blood-brain barrier,” and U.S. Pat. No. 6,936,589, “Parenteral delivery systems,” each incorporated herein by reference.

[0485] In some embodiments, a compound of the disclosure is coupled to a dopamine reuptake inhibitor (DRI), a selective serotonin reuptake inhibitor (SSRI), a noradrenaline reuptake inhibitor (NRI), a norepinephrine-dopamine reuptake inhibitor (NDRI), and a serotonin-norepinephrine-dopamine reuptake inhibitor (SNDRI), using methods described in, e.g., U.S. Pat. No. 9,193,969, incorporated herein by reference.

[0486] In some embodiments, subjects treated using the methods and compositions are evaluated for improvement in condition using any methods known and described in the art.

[0487] In some embodiments, the SCN1A NIE containing pre-mRNA transcript is encoded by a genetic sequence with at least about 80%, 85%, 90%, 95%, 96%, 97%, 98%, 99% or 100% sequence identity to any one of the sequences listed in Table 1 or Table 2. In some embodiments, the SCN1A NIE pre-mRNA transcript comprises a sequence with at least about 80%, 85%, 90%, 95%, 96%, 97%, 98%, 99% or 100% sequence identity to any one of the sequences listed in Table 1 or Table 2.

[0488] In some embodiments, the SCN1A NIE containing pre-mRNA transcript comprises a sequence with at least about 80%, 85%, 90%, 95%, 97%, or 100% sequence identity to any one of the sequences listed in Table 1 or Table 2. In some embodiments, SCN1A NIE containing pre-mRNA transcript is encoded by a sequence with at least about 80%, 85%, 90%, 95%, 97%, or 100% sequence identity to any one of the sequences listed in Table 1 or Table 2. In some embodiments, the targeted portion of the pre-mRNA containing an NMD exon and encoding Na_{V}1.1 comprises a sequence with at least 80%, 85%, 90%, 95%, 97%, or 100% sequence identity to a region comprising at least 8 contiguous nucleic acids of any one of the sequences listed in Table 1 or Table 2.

[0489] In some embodiments, the pre-mRNA transcript comprises a sequence with at least about 80%, 85%, 90%, 95%, 96%, 97%, 98%, 99% or 100% sequence identity to a pre-mRNA transcript of SCN1A pre-mRNA transcripts or a complement thereof described herein. In some embodiments, the targeted portion of the pre-mRNA selected from the group consisting of SCN1A pre-mRNAs comprises a sequence with at least 80%, 85%, 90%, 95%, 97%, or 100% sequence identity to a region comprising at least 8 contiguous nucleic acids of a sequence of the pre-mRNA transcripts of Table 1 or Table 2 or complements thereof. In some embodiments, the targeted portion of the pre-mRNA of SCN1A pre-mRNA comprises a sequence that is complementary to at least 8, 9, 10, 11, 12, 13, 14, 15, 16, 17, 18, 19 or 20 contiguous nucleic acids of a sequence of Table 1 or Table 2 or a complement thereof.

[0490] In some embodiments, the pre-mRNA transcript comprises a sequence with at least about 80%, 85%, 90%, 95%, 96%, 97%, 98%, 99% or 100% sequence identity to a pre-mRNA transcript of SCN1A pre-mRNA transcripts or a complement thereof described herein. In some embodiments, the targeted portion of the pre-mRNA selected from the group consisting of SCN1A pre-mRNAs comprises a sequence with at least 80%, 85%, 90%, 95%, 97%, or 100% sequence identity to a region comprising at least 8 contiguous nucleic acids of a sequence of the pre-mRNA transcripts of Table 1 or Table 2 or complements thereof. In some embodiments, the targeted portion of the pre-mRNA of SCN1A pre-mRNA comprises a sequence that is complementary to at least 8, 9, 10, 11, 12, 13, 14, 15, 16, 17, 18, 19 or 20 contiguous nucleic acids of a sequence of Table 1 or Table 2 or a complement thereof.

[0491] In some embodiments, the targeted portion of the SCN1A pre-mRNA comprises a sequence with at least 80%, 85%, 90%, 95%, 97%, or 100% sequence identity to a region comprising at least 8 contiguous nucleic acids of a sequence of sequence of Table 3 or complements thereof. In some embodiments, the targeted portion of the SCN1A pre-mRNA comprises a sequence with at least 80%, 85%, 90%, 95%, 97%, or 100% sequence identity to a region comprising at least 8 contiguous nucleic acids of a sequence selected from the group consisting of sequences listed in Table 2 or Table 3 or complements thereof.

[0492] In some embodiments, the ASO has a sequence complementary to the targeted portion of the pre-mRNA containing an NMD exon according to any one of the sequences listed in Table 1 or Table 2. In some embodiments, the ASO targets a sequence upstream from the 5′ end of an NIE. For example, ASOs targeting a sequence upstream from the 5′ end of an NIE comprises a sequence that is at least about 80%, 85%, 90%, 95%, 97%, or 100% complementary to at least 8 contiguous nucleic acids of any one of the sequences listed in Table 1 or Table 2. For example, ASOs targeting a sequence upstream from the 5′ end of an NIE can comprise a sequence with at least 80%, 85%, 90%, 95%, 97%, or 100% sequence identity to any one of the sequences listed in Table 1 or Table 2.

[0493] In some embodiments, the ASOs target a sequence containing an exon-intron boundary (or junction). For example, ASOs targeting a sequence containing an exon-intron boundary can comprise a sequence that is at least about 80%, 85%, 90%, 95%, 97%, or 100% complementary to at least 8 contiguous nucleic acids of any one of the sequences listed in Table 1 or Table 2. In some embodiments, the ASOs target a sequence downstream from 3′ end of an NIE. For example, ASOs targeting a sequence downstream from 3′ end of an NIE can comprise a sequence with at least 80%, 85%, 90%, 95%, 97%, or 100% sequence identity to any one of the sequences listed in Table 1 or Table 2. For example, ASOs targeting a sequence downstream from 3′ end of an NIE can comprise a sequence with at least 80%, 85%, 90%, 95%, 97%, or 100% sequence identity to any one of the sequences listed in Table 1 or Table 2. In some embodiments, ASOs target a sequence within an NIE.

Methods of Identifying Additional ASOs that Induce Exon Skipping

[0494] Also within the scope of the present disclosure are methods for identifying or determining ASOs that induce exon skipping of a SCN1A NIE containing pre-mRNA. For example, a method can comprise identifying or determining ASOs that induce pseudo-exon skipping of a SCN1A NIE containing pre-mRNA. ASOs that specifically hybridize to different nucleotides within the target region of the pre-mRNA may be screened to identify or determine ASOs that improve the rate and/or extent of splicing of the target intron. In some embodiments, the ASO may block or interfere with the binding site(s) of a splicing repressor(s)/silencer. Any method known in the art may be used to identify (determine) an ASO that when hybridized to the target region of the exon results in the desired effect (e.g., pseudo-exon skipping, protein or functional RNA production). These methods also can be used for identifying ASOs that induce exon skipping of the included exon by binding to a targeted region in an intron flanking the included exon, or in a non-included exon. An example of a method that may be used is provided below.

[0495] A round of screening, referred to as an ASO “walk” may be performed using ASOs that have been designed to hybridize to a target region of a pre-mRNA. For example, the ASOs used in the ASO walk can be tiled every 5 nucleotides from approximately 100 nucleotides upstream of 3′ splice site of the included exon (e.g., a portion of sequence of the exon located upstream of the target/included exon) to approximately 100 nucleotides downstream of 3′ splice site of the target/included exon and/or from approximately 100 nucleotides upstream of 5′ splice site of the included exon to approximately 100 nucleotides downstream of 5′ splice site of the target/included exon (e.g., a portion of sequence of the exon located downstream of the target/included exon). For example, a first ASO of 15 nucleotides in length may be designed to specifically hybridize to nucleotides +6 to +20 relative to 3′ splice site of the target/included exon. A second ASO may be designed to specifically hybridize to nucleotides +11 to +25 relative to 3′ splice site of the target/included exon. ASOs are designed as such spanning the target region of the pre-mRNA. In some embodiments, the ASOs can be tiled more closely, e.g., every 1, 2, 3, or 4 nucleotides. Further, the ASOs can be tiled from 100 nucleotides downstream of 5′ splice site, to 100 nucleotides upstream of 3′ splice site. In some embodiments, the ASOs can be tiled from about 1,160 nucleotides upstream of 3′ splice site, to about 500 nucleotides downstream of 5′ splice site. In some embodiments, the ASOs can be tiled from about 500 nucleotides upstream of 3′ splice site, to about 1,920 nucleotides downstream of the 3′ splice site.

[0496] One or more ASOs, or a control ASO (an ASO with a scrambled sequence, sequence that is not expected to hybridize to the target region) are delivered, for example by transfection, into a disease-relevant cell line that expresses the target pre-mRNA (e.g., a NIE containing pre-mRNA described herein). The exon skipping effects of each of the ASOs may be assessed by any method known in the art, for example by reverse transcriptase (RT)-PCR using primers that span the splice junction. A reduction or absence of a longer RT-PCR product produced using the primers spanning the region containing the included exon (e.g., including the flanking exons of the NIE) in ASO-treated cells as compared to in control ASO-treated cells indicates that splicing of the target NIE has been enhanced. In some embodiments, the exon skipping efficiency (or the splicing efficiency to splice the intron containing the NIE), the ratio of spliced to unspliced pre-mRNA, the rate of splicing, or the extent of splicing may be improved using the ASOs described herein. The amount of protein or functional RNA that is encoded by the target pre-mRNA can also be assessed to determine whether each ASO achieved the desired effect (e.g., enhanced functional protein production). Any method known in the art for assessing and/or quantifying protein production, such as Western blotting, flow cytometry, immunofluorescence microscopy, and ELISA, can be used.

[0497] A second round of screening, referred to as an ASO “micro-walk” may be performed using ASOs that have been designed to hybridize to a target region of a pre-mRNA. The ASOs used in the ASO micro-walk are tiled every 1 nucleotide to further refine the nucleotide acid sequence of the pre-mRNA that when hybridized with an ASO results in exon skipping (or enhanced splicing of NIE).

[0498] Regions defined by ASOs that promote splicing of the target intron are explored in greater detail by means of an ASO “micro-walk”, involving ASOs spaced in 1-nt steps, as well as longer ASOs, typically 18-25 nt.

[0499] As described for the ASO walk above, the ASO micro-walk is performed by delivering one or more ASOs, or a control ASO (an ASO with a scrambled sequence, sequence that is not expected to hybridize to the target region), for example by transfection, into a disease-relevant cell line that expresses the target pre-mRNA. The splicing-inducing effects of each of the ASOs may be assessed by any method known in the art, for example by reverse transcriptase (RT)-PCR using primers that span the NIE, as described herein. A reduction or absence of a longer RT-PCR product produced using the primers spanning the NIE in ASO-treated cells as compared to in control ASO-treated cells indicates that exon skipping (or splicing of the target intron containing an NIE) has been enhanced. In some embodiments, the exon skipping efficiency (or the splicing efficiency to splice the intron containing the NIE), the ratio of spliced to unspliced pre-mRNA, the rate of splicing, or the extent of splicing may be improved using the ASOs described herein. The amount of protein or functional RNA that is encoded by the target pre-mRNA can also be assessed to determine whether each ASO achieved the desired effect (e.g., enhanced functional protein production). Any method known in the art for assessing and/or quantifying protein production, such as Western blotting, flow cytometry, immunofluorescence microscopy, and ELISA, can be used.

### Kits and Compositions

[0500] In some aspects, provided herein is a kit comprising: a concentrate comprising a compound disclosed herein and a diluent, wherein the concentrate is miscible with the diluent; and instructions for diluting or solubilizing the compound in the diluent. In some aspects, provided herein is a kit comprising: a concentrate comprising an antisense oligomer (ASO), wherein the ASO comprises a sequence with at least 80% sequence identity to any one of SEQ ID NOs: 21-67, 210-256 or 304-1099; and a diluent, wherein the concentrate is miscible with the diluent; and instructions for diluting or solubilizing the ASO in the diluent. In some embodiments, the ASO comprises a sequence with at least 80% sequence identity to any one of the sequences listed in listed in Tables 4A, 4B, 5A, 5B, 6A, 6B, 7, 8A, and 8B.

[0501] In some embodiments, the ASO comprises a sequence with at least 60%, 65%, 66%, 67%, 68%, 69%, 70%, 71%, 72%, 73%, 74%, 75%, 76%, 77%, 78%, 79%, 80%, 81%, 82%, 83%, 884%, 85%, 86%, 87%, 88%, 89%, 90%, 91%, 92%, 93%, 94%, 95%, 96%, 97%, 98%, 99%, 99.5%, 99.8%, 99.9%, or 100% sequence identity to any one of SEQ ID NOs: 21-67, 210-256 or 304-1099. In some embodiments, the ASO consists of a sequence with at least 60%, 65%, 66%, 67%, 68%, 69%, 70%, 71%, 72%, 73%, 74%, 75%, 76%, 77%, 78%, 79%, 80%, 81%, 82%, 83%, 884%, 85%, 86%, 87%, 88%, 89%, 90%, 91%, 92%, 93%, 94%, 95%, 96%, 97%, 98%, 99%, 99.5%, 99.8%, 99.9%, or 100% sequence identity to any one of SEQ ID NOs: 21-67, 210-256 or 304-1099. In some embodiments, the ASO comprises a sequence with at least 60%, 65%, 66%, 67%, 68%, 69%, 70%, 71%, 72%, 73%, 74%, 75%, 76%, 77%, 78%, 79%, 80%, 81%, 82%, 83%, 884%, 85%, 86%, 87%, 88%, 89%, 90%, 91%, 92%, 93%, 94%, 95%, 96%, 97%, 98%, 99%, 99.5%, 99.8%, 99.9%, or 100% sequence identity to any one of the sequences listed in listed in Tables 4A, 4B, 5A, 5B, 6A, 6B, 7, 8A, and 8B. In some embodiments, the ASO consists of a sequence with at least 60%, 65%, 66%, 67%, 68%, 69%, 70%, 71%, 72%, 73%, 74%, 75%, 76%, 77%, 78%, 79%, 80%, 81%, 82%, 83%, 884%, 85%, 86%, 87%, 88%, 89%, 90%, 91%, 92%, 93%, 94%, 95%, 96%, 97%, 98%, 99%, 99.5%, 99.8%, 99.9%, or 100% sequence identity to any one of the sequences listed in listed in Tables 4A, 4B, 5A, 5B, 6A, 6B, 7, 8A, and 8B.

[0502] In some embodiments, the diluent is an artificial cerebral spinal fluid (aCSF) solution. In some embodiments, the solution comprises a cerebral spinal fluid (CSF) sample from the human subject. In some embodiments, the diluent comprises an isotonic solution. In some embodiments, the diluent comprises a phosphate-buffered (pH 6.6-7.6) solution.

[0503] In some embodiments, the compound as described herein (e.g., compound (I) or a salt thereof, or compound (II)) is solubilized or diluted in a phosphate-buffered (pH 6.6-7.6) solution. In some embodiments, the compound as described herein (e.g., compound (I) or a salt thereof, or compound (II)) is solubilized or diluted in a phosphate-buffered (pH 6.0-8.0) solution. In some embodiments, the compound as described herein (e.g., compound (I) or a salt thereof, or compound (II)) is solubilized or diluted in a phosphate-buffered (pH 5.0-8.0) solution. In some embodiments, the compound as described herein (e.g., compound (I) or a salt thereof, or compound (II)) is solubilized or diluted in a phosphate-buffered solution with pH 4.5-8.5, pH 4.6-8.5, pH 4.7-8.5, pH 4.8-8.5, pH 4.9-8.5, pH5.0-8.5, pH 5.1-8.5, pH5.2-8.5, pH 5.3-8.5, pH5.4-8.5, pH 5.5-8.5, pH5.6-8.5, pH 5.7-8.5, pH 5.8-8.5, H 5.9-8.5, pH 6.0-8.5, pH 6.1-8.5, pH 6.2-8.5, pH 6.3-8.5, pH 6.4-8.5, pH 6.5-8.5, pH 6.6-8.5, pH 6.7-8.5, pH 6.8-8.5, pH 6.9-8.5, pH 7.0-8.5, pH 7.1-8.5, pH 7.2-8.5, pH 7.3-8.5, pH 7.4-8.5, pH 7.5-8.5, pH 7.6-8.5, pH 7.7-8.5, pH 7.8-8.5, pH 7.9-8.5, pH 8.0-8.5, pH 8.1-8.5, pH 8.2-8.5, pH 8.3-8.5, or pH 8.4-8.5. In some embodiments, the compound as described herein (e.g., compound (I) or a salt thereof, or compound (II)) is solubilized or diluted in a phosphate-buffered solution with pH 4.5-8.3, pH 4.5-8.2, pH 4.5-8.1, pH 4.5-8.0, pH 4.5-7.9, pH 4.5-7.8, pH 4.5-7.7, pH 4.5-7.6, pH 4.5-7.5, pH 4.5-7.4, pH 4.5-7.3, pH 4.5-7.2, pH 4.5-7.1, pH 4.5-7.0, pH 4.5-6.9, pH 4.5-6.8, pH 4.5-6.7, pH 4.5-6.6, pH 4.5-6.5, pH 4.5-6.4, pH 4.5-6.3, pH 4.5-6.2, pH 4.5-6.1, pH 4.5-6.0, pH 4.5-5.9, pH 4.5-5.8, pH 4.5-5.7, pH 4.5-5.6, pH 4.5-5.5, pH 4.5-5.4, pH 4.5-5.3, pH 4.5-5.2, pH 4.5-5.1, pH 4.5-5.0, pH 4.5-4.9, pH 4.5-4.8, pH 4.5-4.7, or pH 4.5-4.6. In some embodiments, the compound as described herein (e.g., compound (I) or a salt thereof, or compound (II)) is solubilized or diluted in a phosphate-buffered solution with pH 6.0-7.6, pH 6.1-7.6, pH 6.2-7.6, pH 6.3-7.6, pH 6.4-7.6, pH 6.5-7.6, pH 6.6-7.6, pH 6.7-7.6, pH 6.8-7.6, pH 6.9-7.6, pH 7.0-7.6, pH 7.1-7.6, pH 7.2-7.6, pH 7.3-7.6, pH 7.4-7.6, or pH 7.5-7.6. In some embodiments, the compound as described herein (e.g., compound (I) or a salt thereof, or compound (II)) is solubilized or diluted in a phosphate-buffered solution with pH 6.6-8.0, pH 6.6-7.9, pH 6.6-7.8, pH 6.6-7.7, pH 6.6-7.6, pH 6.6-7.5, pH 6.6-7.4, pH 6.6-7.3, pH 6.6-7.2, pH 6.6-7.1, pH 6.6-7.0, pH 6.6-6.9, pH 6.6-6.8, or pH 6.6-6.7. In some embodiments, the compound as described herein (e.g., compound (I) or a salt thereof, or compound (II)) is solubilized or diluted in a phosphate-buffered solution with pH 6.0-8.0, pH 6.1-8.0, pH 6.2-8.0, pH 6.3-8.0, pH 6.4-8.0, pH 6.5-8.0, pH 6.6-8.0, pH 6.7-8.0, pH 6.8-8.0, pH 6.9-8.0, pH 7.0-8.0, pH 7.1-8.0, pH 7.2-8.0, pH 7.3-8.0, pH 7.4-8.0, pH 7.5-8.0, pH 7.6-8.0, pH 7.7-8.0, pH 7.8-8.0, or pH 7.9-8.0. In some embodiments, the compound as described herein (e.g., compound (I) or a salt thereof, or compound (II)) is solubilized or diluted in a phosphate-buffered solution with pH 6.0-7.9, pH 6.0-7.8, pH 6.0-7.7, pH 6.0-7.6, pH 6.0-7.5, pH 6.0-7.4, pH 6.0-7.3, pH 6.0-7.2, pH 6.0-7.1, pH 6.0-7.0, pH 6.0-6.9, pH 6.0-6.8, pH 6.0-6.7, pH 6.0-6.6, pH 6.0-6.5, pH 6.0-6.4, pH 6.0-6.3, pH 6.0-6.2, or pH 6.0-6.1. In some embodiments, the compound as described herein (e.g., compound (I) or a salt thereof, or compound (II)) is solubilized or diluted in a phosphate-buffered solution with pH 5.7-8.5, 5.8-8.4, 5.9-8.3, 6.0-8.2, 6.1-8.1, 6.2-8.0, 6.3-7.9, 6.4-7.8, 6.5-7.7, or 6.6-7.6. In some embodiments, the compound as described herein (e.g., compound (I) or a salt thereof, or compound (II)) is solubilized or diluted in a phosphate-buffered solution with pH about 5.0, 5.1, 5.2, 5.3, 5.4, 5.5, 5.6, 5.7, 5.8, 5.9, 6.0. 6.1, 6.2, 6.3, 6.4, 6.5, 6.6, 6.7, 6.8, 6.9, 7.0, 7.1, 7.2, 7.3, 7.4, 7.5, 7.6, 7.7, 7.8, 7.9, or 8.0. In some embodiments, the compound as described herein (e.g., compound (I) or a salt thereof, or compound (II)) is solubilized or diluted in a phosphate-buffered solution with pH 5.0, 5.1, 5.2, 5.3, 5.4, 5.5, 5.6, 5.7, 5.8, 5.9, 6.0. 6.1, 6.2, 6.3, 6.4, 6.5, 6.6, 6.7, 6.8, 6.9, 7.0, 7.1, 7.2, 7.3, 7.4, 7.5, 7.6, 7.7, 7.8, 7.9, or 8.0.

[0504] In some embodiments, the diluent comprises 25-250 mM NaCl.

[0505] In some embodiments, the diluent comprises 25-250, 30-250, 35-250, 40-250, 45-250, 50-250, 55-250, 60-250, 65-250, 70-250, 75-250, 80-250, 85-250, 90-250, 95-250, 100-250, 105-250, 110-250, 115-250, 120-250, 125-250, 130-250, 135-250, 140-250, 145-250, 150-250, 155-250, 160-250, 165-250, 170-250, 175-250, 180-250, 185-250, 190-250, 195-250, 200-250, 205-250, 210-250, 215-250, 220-250, 225-250, 230-250, 235-250, 240-250, or 245-250 mM NaCl. In some embodiments, the diluent comprises 25-245, 25-240, 25-235, 25-230, 25-225, 25-220, 25-215, 25-210, 25-205, 25-200, 25-195, 25-190, 25-185, 25-180, 25-175, 25-170, 25-165, 25-160, 25-155, 25-150, 25-145, 25-140, 25-135, 25-130, 25-125, 25-120, 25-115, 25-110, 25-105, 25-110, 25-105, 25-100, 25-95, 25-90, 25-85, 25-80, 25-75, 25-70, 25-65, 25-60, 25-55, 25-50, 25-45, 25-40, 25-35, or 25-30 mM NaCl. In some embodiments, the diluent comprises 30-245, 35-240, 40-235, 45-230, 50-225, 55-220, 60-215, 65-210, 70-205, 75-200, 80-195, 85-190, 90-185, 95-180, 100-175, 105-170, 110-165, 115-160, 120-155, 125-150, 130-145 or 135-140 mM NaCl. In some embodiments, the diluent comprises 100-140, 101-140, 102-140, 103-140, 104-140, 105-140, 106-140, 107-140, 108-140, 109-140, 110-140, 111-140, 112-140, 113-140, 114-140, 115-140, 116-140, 117-140, 118-140, 119-140, 120-140, 121-140, 122-140, 123-140, 124-140, 125-140, 126-140, 127-140, 128-140, 129-140, 130-140, 131-140, 132-140, 133-140, 134-140, 135-140, 136-140, 137-140, 138-140, or 139-140 mM NaCl. In some embodiments, the diluent comprises 100-139, 100-138, 100-137, 100-136, 100-135, 100-134, 100-133, 100-132, 100-131, 100-130, 100-129, 100-128, 100-127, 100-126, 100-125, 100-124, 100-123, 100-122, 100-121, 100-120, 100-119, 100-118, 100-117, 100-116, 100-115, 100-114, 100-113, 100-112, 100-111, 100-110, 100-109, 100-108, 100-107, 100-106, 100-105, 100-104, 100-103, 100-102, or 100-101 mM NaCl. In some embodiments, the diluent comprises at least 90, 91, 92, 93, 94, 95, 96, 97, 98, 99, 100, 101, 102, 103, 104, 105, 106, 107, 108, 109, 110, 111, 112, 113, 114, 115, 116, 118, 119, 120, 121, 122, 123, 124, 125, 126, 127, 128, 129, 130, 131, 132, 133, 134, 135, 136, 137, 138, 139, or 140 mM NaCl. In some embodiments, the diluent comprises at most 90, 91, 92, 93, 94, 95, 96, 97, 98, 99, 100, 101, 102, 103, 104, 105, 106, 107, 108, 109, 110, 111, 112, 113, 114, 115, 116, 118, 119, 120, 121, 122, 123, 124, 125, 126, 127, 128, 129, 130, 131, 132, 133, 134, 135, 136, 137, 138, 139, or 140 mM NaCl. In some embodiments, the diluent comprises 90, 91, 92, 93, 94, 95, 96, 97, 98, 99, 100, 101, 102, 103, 104, 105, 106, 107, 108, 109, 110, 111, 112, 113, 114, 115, 116, 118, 119, 120, 121, 122, 123, 124, 125, 126, 127, 128, 129, 130, 131, 132, 133, 134, 135, 136, 137, 138, 139, or 140 mM NaCl.

[0506] In some embodiments, the diluent comprises 0.1-20 mM KCl.

[0507] In some embodiments, the diluent comprises 0.1-40, 0.1-39, 0.1-38, 0.1-37, 0.1-36, 0.1-35, 0.1-34, 0.1-33, 0.1-32, 0.1-31, 0.1-30, 0.1-29, 0.1-28, 0.1-27, 0.1-26, 0.1-25, 0.1-24, 0.1-23, 0.1-22, 0.1-21, 0.1-20, 0.1-19, 0.1-18, 0.1-17, 0.1-16, 0.1-15, 0.1-14, 0.1-13, 0.1-12, 0.1-10, 0.1-9, 0.1-8, 0.1-7, 0.1-6, 0.1-5, 0.1-4, 0.1-3, 0.1-2, or 0.1-1 mM KCl. In some embodiments, the diluent comprises 0.2-40, 0.3-40, 0.4-40, 0.5-40, 0.6-40, 0.7-40, 0.8-40, 0.9-40, 1-40, 2-40, 3-40, 4-40, 5-40, 6-40, 7-40, 8-40, 9-40, 10-40, 11-40, 12-40, 13-40, 14-40, 15-40, 16-40, 17-40, 18-40, 19-40, 20-40, 21-40, 22-40, 23-40, 24-40, 25-40, 26-40, 27-40, 28-40, 29-40, 30-40, 31-40, 32-40, 33-40, 34-40, 35-40, 36-40, 37-40, 38-40, or 39-40 mM KCl. In some embodiments, the diluent comprises 0.1-3.5, 0.2-3.5, 0.3-3.5, 0.4-3.5, 0.5-3.5, 0.6-3.5, 0.7-3.5, 0.8-3.5, 0.9-3.5, 1.0-3.5, 1.1-3.5, 1.2-3.5, 1.3-3.5, 1.4-3.5, 1.5-3.5, 1.6-3.5, 1.7-3.5, 1.8-3.5, 1.9-3.5, 2.0-3.5, 2.1-3.5, 2.2-3.5, 2.3-3.5, 2.4-3.5, 2.5-3.5, 2.6-3.5, 2.7-3.5, 2.8-3.5, 2.9-3.5, 3.0-3.5, 3.1-3.5, 3.2-3.5, 3.3-3.5, or 3.4-3.5 mM KCl. In some embodiments, the diluent comprises 0.1-3.4, 0.1-3.3, 0.1-3.2, 0.1-3.1, 0.1-3.0, 0.1-2.9, 0.1-2.8, 0.1-2.7, 0.1-2.6, 0.1-2.5, 0.1-2.4, 0.1-2.3, 0.1-2.2, 0.1-2.1, 0.1-2.0, 0.1-1.9, 0.1-1.8, 0.1-1.7, 0.1-1.6, 0.1-1.5, 0.1-1.4, 0.1-1.3, 0.1-1.2, 0.1-1.1, 0.1-1.0, 0.1-0.9, 0.1-0.8, 0.1-0.7, 0.1-0.6, 0.1-0.5, 0.1-0.4, 0.1-0.3, or 0.1-0.2 mM KCl. In some embodiments, the diluent comprises at least 0.1, 0.2, 0.3, 0.4, 0.5, 0.6, 0.7, 0.8, 0.9, 1.0, 1.1, 1.2, 1.3, 1.4, 1.5, 1.6, 1.7, 1.8, 1.9, 2.0, 2.1, 2.2, 2.3, 2.4, 2.5, 2.6, 2.7, 2.8, 2.9, 3.0, 3.1, 3.2, 3.3, 3.4, or 3.5 mM KCl. In some embodiments, the diluent comprises at most 0.1, 0.2, 0.3, 0.4, 0.5, 0.6, 0.7, 0.8, 0.9, 1.0, 1.1, 1.2, 1.3, 1.4, 1.5, 1.6, 1.7, 1.8, 1.9, 2.0, 2.1, 2.2, 2.3, 2.4, 2.5, 2.6, 2.7, 2.8, 2.9, 3.0, 3.1, 3.2, 3.3, 3.4, or 3.5 mM KCl. In some embodiments, the diluent comprises 0.1, 0.2, 0.3, 0.4, 0.5, 0.6, 0.7, 0.8, 0.9, 1.0, 1.1, 1.2, 1.3, 1.4, 1.5, 1.6, 1.7, 1.8, 1.9, 2.0, 2.1, 2.2, 2.3, 2.4, 2.5, 2.6, 2.7, 2.8, 2.9, 3.0, 3.1, 3.2, 3.3, 3.4, or 3.5 mM KCl.

[0508] In some embodiments, the diluent comprises 0-50 mM Na₂HPO₄.

[0509] In some embodiments, the diluent comprises 0-50, 0-45, 0-40, 0-35, 0-30, 0-25, 0-20, 0-19, 0-18, 0-17, 0-16, 0-15, 0-14, 0-13, 0-12, 0-11, 0-10, 0-9, 0-8, 0-7, 0-6, 0-5, 0-4, 0-3, 0-2, 0-1, 0-0.9, 0-0.8, 0-0.7, 0-0.6, 0-0.5, 0-0.4, 0-0.3, or 0-0.2 mM Na₂HPO₄. In some embodiments, the diluent comprises 0.1-50, 0.1-45, 0.1-40, 0.1-35, 0.1-30, 0.1-25, 0.1-20, 0.1-19, 0.1-18, 0.1-17, 0.1-16, 0.1-15, 0.1-14, 0.1-13, 0.1-12, 0.1-11, 0.1-10, 0.1-9, 0.1-8, 0.1-7, 0.1-6, 0.1-5, 0.1-4, 0.1-3, 0.1-2, 0.1-1, 0.1-0.9, 0.1-0.8, 0.1-0.7, 0.1-0.6, 0.1-0.5, 0.1-0.4, 0.1-0.3, or 0.1-0.2 mM Na₂HPO₄. In some embodiments, the diluent comprises 0-50, 0.1-50, 0.2-50, 0.3-50, 0.4-50, 0.5-50, 0.6-50, 0.7-50, 0.8-50, 0.9-50, 1-50, 2-50, 3-50, 4-50, 5-50, 6-50, 7-50, 8-50, 9-50, 1-50, 11-50, 12-50, 13-50, 14-50, 15-50, 16-50, 17-50, 18-50, 19-50, 20-50, 25-50, 30-50, 35-50, 40-50, or 45-50 mM Na₂HPO₄. In some embodiments, the diluent comprises 0-20, 0.1-20, 0.2-20, 0.3-20, 0.4-20, 0.5-20, 0.6-20, 0.7-20, 0.8-20, 0.9-20, 1-20, 2-20, 3-20, 4-20, 5-20, 6-20, 7-20, 8-20, 9-20, 10-20, 11-20, 12-20, 13-20, 14-20, 15-20, 16-20, 17-20, 18-20, or 19-20 mM Na₂HPO₄. In some embodiments, the diluent comprises at least 0, 0.1, 0.2, 0.3, 0.4, 0.5, 0.6, 0.7, 0.8, 0.9, 1, 2, 3, 4, 5, 6, 7, 8, 9, 10, 11, 12, 13, 14, 15, 16, 17, 18, 19, or 20 mM Na₂HPO₄. In some embodiments, the diluent comprises at most 0, 0.1, 0.2, 0.3, 0.4, 0.5, 0.6, 0.7, 0.8, 0.9, 1, 2, 3, 4, 5, 6, 7, 8, 9, 10, 11, 12, 13, 14, 15, 16, 17, 18, 19, or 20 mM Na₂HPO₄. In some embodiments, the diluent comprises 0, 0.1, 0.2, 0.3, 0.4, 0.5, 0.6, 0.7, 0.8, 0.9, 1, 2, 3, 4, 5, 6, 7, 8, 9, 10, 11, 12, 13, 14, 15, 16, 17, 18, 19, or 20 mM Na₂HPO₄.

[0510] In some embodiments, the diluent comprises 0-50 mM NaH₂PO₄.

[0511] In some embodiments, the diluent comprises 0-50, 0-45, 0-40, 0-35, 0-30, 0-25, 0-20, 0-19, 0-18, 0-17, 0-16, 0-15, 0-14, 0-13, 0-12, 0-11, 0-10, 0-9, 0-8, 0-7, 0-6, 0-5, 0-4, 0-3, 0-2, 0-1, 0-0.9, 0-0.8, 0-0.7, 0-0.6, 0-0.5, 0-0.4, 0-0.3, or 0-0.2 mM NaH₂PO₄. In some embodiments, the diluent comprises 0.1-50, 0.1-45, 0.1-40, 0.1-35, 0.1-30, 0.1-25, 0.1-20, 0.1-19, 0.1-18, 0.1-17, 0.1-16, 0.1-15, 0.1-14, 0.1-13, 0.1-12, 0.1-11, 0.1-10, 0.1-9, 0.1-8, 0.1-7, 0.1-6, 0.1-5, 0.1-4, 0.1-3, 0.1-2, 0.1-1, 0.1-0.9, 0.1-0.8, 0.1-0.7, 0.1-0.6, 0.1-0.5, 0.1-0.4, 0.1-0.3, or 0.1-0.2 mM NaH₂PO₄. In some embodiments, the diluent comprises 0-50, 0.1-50, 0.2-50, 0.3-50, 0.4-50, 0.5-50, 0.6-50, 0.7-50, 0.8-50, 0.9-50, 1-50, 2-50, 3-50, 4-50, 5-50, 6-50, 7-50, 8-50, 9-50, 1-50, 11-50, 12-50, 13-50, 14-50, 15-50, 16-50, 17-50, 18-50, 19-50, 20-50, 25-50, 30-50, 35-50, 40-50, or 45-50 mM NaH₂PO₄. In some embodiments, the diluent comprises 0-20, 0.1-20, 0.2-20, 0.3-20, 0.4-20, 0.5-20, 0.6-20, 0.7-20, 0.8-20, 0.9-20, 1-20, 2-20, 3-20, 4-20, 5-20, 6-20, 7-20, 8-20, 9-20, 10-20, 11-20, 12-20, 13-20, 14-20, 15-20, 16-20, 17-20, 18-20, or 19-20 mM NaH₂PO₄. In some embodiments, the diluent comprises at least 0, 0.1, 0.2, 0.3, 0.4, 0.5, 0.6, 0.7, 0.8, 0.9, 1, 2, 3, 4, 5, 6, 7, 8, 9, 10, 11, 12, 13, 14, 15, 16, 17, 18, 19, or 20 mM NaH₂PO₄. In some embodiments, the diluent comprises at most 0, 0.1, 0.2, 0.3, 0.4, 0.5, 0.6, 0.7, 0.8, 0.9, 1, 2, 3, 4, 5, 6, 7, 8, 9, 10, 11, 12, 13, 14, 15, 16, 17, 18, 19, or 20 mM NaH₂PO₄. In some embodiments, the diluent comprises 0, 0.1, 0.2, 0.3, 0.4, 0.5, 0.6, 0.7, 0.8, 0.9, 1, 2, 3, 4, 5, 6, 7, 8, 9, 10, 11, 12, 13, 14, 15, 16, 17, 18, 19, or 20 mM NaH₂PO₄.

[0512] In some embodiments, the diluent comprises 0.1-50 mM CaCl₂.

[0513] In some embodiments, the diluent comprises 0.1-50, 0.2-50, 0.3-50, 0.4-50, 0.5-50, 0.6-50, 0.7-50, 0.8-50, 0.9-50, 1.0-50, −50, 1.1-50, 1.2-50, 1.3-50, 1.4-50, 1.5-50, 1.6-50, 1.7-50, 1.8-50, 1.9-50, 2.0-50, 2.1-50, 2.2-50, 2.3-50, 2.4-50, 2.5-50, 2.6-50, 2.7-50, 2.8-50, 2.9-50, 3.0-50, 3.1-50, 3.2-50, 3.3-50, 3.4-50, 3.5-50, 3.6-50, 3.7-50, 3.8-50, 3.9-50, 4-50, 5-50, 6-50, 7-50, 8-50, 9-50, 10-50, 15-50, 20-50, 25-50, 1 30-50, 35-50, 40-50, or 45-50 mM CaCl₂. In some embodiments, the diluent comprises 0.1-45, 0.1-40, 0.1-35, 0.1-30, 0.1-25, 0.1-20, 0.1-15, 0.1-10, 0.1-5, 0.1-4, 0.1-4.9, 0.1-4.8, 0.1-4.7, 0.1-4.6, 0.1-4.5, 0.1-4.4, 0.1-4.3, 0.1-4.2, 0.1-4.1, 0.1-4.0, 0.1-3.9, 0.1-3.8, 0.1-3.7, 0.1-3.6, 0.1-3.5, 0.1-3.4, 0.1-3.3, 0.1-3.2, 0.1-3.1, 0.1-3.0, 0.1-2.9, 0.1-2.8, 0.1-2.7, 0.1-2.6, 0.1-2.5, 0.1-2.4, 0.1-2.3, 0.1-2.2, 0.1-2.1, 0.1-2.0, 0.1-1.9, 0.1-1.8, 0.1-1.7, 0.1-1.6, 0.1-1.5, 0.1-1.4, 0.1-1.3, 0.1-1.2, 0.1-1.1, 0.1-1.0, 0.1-0.9, 0.1-0.8, 0.1-0.7, 0.1-0.6, 0.1-0.5, 0.1-0.4, 0.1-0.3, or 0.1-0.2 mM CaCl₂. In some embodiments, the diluent comprises at least 1.0, 1.1, 1.2, 1.3, 1.4, 1.5, 1.6, 1.7, 1.8, 1.9, 2.0, 2.1, 2.2, 2.3, 2.4, 2.5, 2.6, 2.7, 2.8, 2.9, 3.0, 3.1, 3.2, 3.3, 3.4, 3.5, 3.6, 3.7, 3.8, 3.9, or 4.0 mM CaCl₂. In some embodiments, the diluent comprises at most 1.0, 1.1, 1.2, 1.3, 1.4, 1.5, 1.6, 1.7, 1.8, 1.9, 2.0, 2.1, 2.2, 2.3, 2.4, 2.5, 2.6, 2.7, 2.8, 2.9, 3.0, 3.1, 3.2, 3.3, 3.4, 3.5, 3.6, 3.7, 3.8, 3.9, or 4.0 mM CaCl₂. In some embodiments, the diluent comprises 1.0, 1.1, 1.2, 1.3, 1.4, 1.5, 1.6, 1.7, 1.8, 1.9, 2.0, 2.1, 2.2, 2.3, 2.4, 2.5, 2.6, 2.7, 2.8, 2.9, 3.0, 3.1, 3.2, 3.3, 3.4, 3.5, 3.6, 3.7, 3.8, 3.9, or 4.0 mM CaCl₂.

[0514] In some embodiments, the diluent comprises 0.1-50 mM MgCl₂.

[0515] In some embodiments, the diluent comprises 0.1-50, 0.2-50, 0.3-50, 0.4-50, 0.5-50, 0.6-50, 0.7-50, 0.8-50, 0.9-50, 1.0-50, −50, 1.1-50, 1.2-50, 1.3-50, 1.4-50, 1.5-50, 1.6-50, 1.7-50, 1.8-50, 1.9-50, 2.0-50, 2.1-50, 2.2-50, 2.3-50, 2.4-50, 2.5-50, 2.6-50, 2.7-50, 2.8-50, 2.9-50, 3.0-50, 3.1-50, 3.2-50, 3.3-50, 3.4-50, 3.5-50, 3.6-50, 3.7-50, 3.8-50, 3.9-50, 4-50, 5-50, 6-50, 7-50, 8-50, 9-50, 10-50, 15-50, 20-50, 25-50, 1 30-50, 35-50, 40-50, or 45-50 mM MgCl₂. In some embodiments, the diluent comprises 0.1-45, 0.1-40, 0.1-35, 0.1-30, 0.1-25, 0.1-20, 0.1-15, 0.1-10, 0.1-5, 0.1-4, 0.1-4.9, 0.1-4.8, 0.1-4.7, 0.1-4.6, 0.1-4.5, 0.1-4.4, 0.1-4.3, 0.1-4.2, 0.1-4.1, 0.1-4.0, 0.1-3.9, 0.1-3.8, 0.1-3.7, 0.1-3.6, 0.1-3.5, 0.1-3.4, 0.1-3.3, 0.1-3.2, 0.1-3.1, 0.1-3.0, 0.1-2.9, 0.1-2.8, 0.1-2.7, 0.1-2.6, 0.1-2.5, 0.1-2.4, 0.1-2.3, 0.1-2.2, 0.1-2.1, 0.1-2.0, 0.1-1.9, 0.1-1.8, 0.1-1.7, 0.1-1.6, 0.1-1.5, 0.1-1.4, 0.1-1.3, 0.1-1.2, 0.1-1.1, 0.1-1.0, 0.1-0.9, 0.1-0.8, 0.1-0.7, 0.1-0.6, 0.1-0.5, 0.1-0.4, 0.1-0.3, or 0.1-0.2 mM MgCl₂. In some embodiments the diluent comprises at least 0.1, 0.2, 0.3, 0.4, 0.5, 0.6, 0.7, 0.8, 0.9, 1.0, 1.1, 1.2, 1.3, 1.4, 1.5, 1.6, 1.7, 1.8, 1.9, 2.0, 2.1, 2.2, 2.3, 2.4, 2.5, 2.6, 2.7, 2.8, 2.9, 3.0, 3.1, 3.2, 3.3, 3.4, 3.5, 3.6, 3.7, 3.8, 3.9, or 4.0 mM MgCl₂. In some embodiments, the diluent comprises at most 0.1, 0.2, 0.3, 0.4, 0.5, 0.6, 0.7, 0.8, 0.9, 1.0, 1.1, 1.2, 1.3, 1.4, 1.5, 1.6, 1.7, 1.8, 1.9, 2.0, 2.1, 2.2, 2.3, 2.4, 2.5, 2.6, 2.7, 2.8, 2.9, 3.0, 3.1, 3.2, 3.3, 3.4, 3.5, 3.6, 3.7, 3.8, 3.9, or 4.0 mM MgCl₂. In some embodiments, the diluent comprises 0.1, 0.2, 0.3, 0.4, 0.5, 0.6, 0.7, 0.8, 0.9, 1.0, 1.1, 1.2, 1.3, 1.4, 1.5, 1.6, 1.7, 1.8, 1.9, 2.0, 2.1, 2.2, 2.3, 2.4, 2.5, 2.6, 2.7, 2.8, 2.9, 3.0, 3.1, 3.2, 3.3, 3.4, 3.5, 3.6, 3.7, 3.8, 3.9, or 4.0 mM MgCl₂.

[0516] In some embodiments, the diluent comprises 1-100 mM NaHCO₃, 1-100 mM KHCO₃, or a combination thereof.

[0517] In some embodiments, the diluent comprises 1-100 mM NaHCO₃.

[0518] In some embodiments, the diluent comprises 1-99, 1-95, 1-90, 1-85, 1-80, 1-75, 1-70, 1-65, 1-60, 1-55, 1-50, 1-45, 1-40, 1-35, 1-30, 1-25, 1-20, 1-15, 1-10, 1-9, 1-8, 1-7, 1-6, 1-5, 1-4, 1-3, or 1-2 mM NaHCO₃. In some embodiments, the diluent comprises 2-100, 3-100, 4-100, 5-100, 6-100, 7-100, 8-100, 9-100, 10-100, 15-100, 20-100, 25-100, 30-100, 35-100, 40-100, 45-100, 50-100, 55-100, 60-100, 65-100, 70-100, 75-100, 80-100, 85-100, 90-100, or 95-100 mM NaHCO₃. In some embodiments, the diluent comprises 24.0-28.0, 24.0-27.9, 24.0-27.8, 24.0-27.7, 24.0-27.6, 24.0-27.5, 24.0-27.4, 24.0-27.3, 24.0-27.2, 24.0-27.1, 24.0-27.0, 24.0-26.9, 24.0-26.8, 24.0-26.7, 24.0-26.6, 24.0-26.5, 24.0-26.4, 24.0-26.3, 24.0-26.2, 24.0-26.1, 24.0-26.0, 24.0-25.9, 4.0-25.8, 24.0-25.7, 24.0-25.6, 24.0-25.5, 24.0-25.4, 24.0-25.3, 24.0-25.2, 24.0-25.1, 24.0-25.0, 24.0-24.9, 24.0-24.8, 24.0-24.7, 24.0-24.6, 24.0-24.5, 24.0-24.4, 24.0-24.3, 24.0-24.2, or 24.0-24.1 mM NaHCO₃. In some embodiments, the diluent comprises 24.1-28.0, 24.2-28.0, 24.3-28.0, 24.4-28.0, 24.5-28.0, 24.6-28.0, 24.7-28.0, 24.8-28.0, 24.9-28.0, 25.0-28.0, 25.1-28.0, 25.2-28.0, 25.3-28.0, 25.4-28.0, 25.5-28.0, 25.6-28.0, 25.7-28.0, 25.8-28.0, 25.9-28.0, 26.0-28.0, 26.1-28.0, 26.2-28.0, 26.3-28.0, 26.4-28.0, 26.5-28.0, 26.6-28.0, 26.7-28.0, 26.8-28.0, 26.9-28.0, 27.0-28.0, 27.1-28.0, 27.2-28.0, 27.3-28.0, 27.4-28.0, 27.5-28.0, 27.6-28.0, 27.7-28.0, 27.8-28.0, or 27.9-28.0 mM NaHCO₃. In some embodiments, the diluent comprises at least 24.0, 24.1, 24.2, 24.3, 24.4, 24.5, 24.6, 24.7, 24.8, 24.9, 25.0, 25.1, 25.2, 25.3, 25.4, 25.5, 25.6, 25.7, 25.8, 25.9, 26.0, 26.1, 26.2, 26.3, 26.4, 26.5, 26.6, 26.7, 26.8, 26.9, 27.0, 27.1, 27.2, 27.3, 27.4, 27.5, 27.6, 27.7, 27.8, 27.9, or 28.0 mM NaHCO₃. In some embodiments, the diluent comprises at most 24.0, 24.1, 24.2, 24.3, 24.4, 24.5, 24.6, 24.7, 24.8, 24.9, 25.0, 25.1, 25.2, 25.3, 25.4, 25.5, 25.6, 25.7, 25.8, 25.9, 26.1, 26.2, 26.3, 26.4, 26.5, 26.6, 26.7, 26.8, 26.9, 27.0, 27.1, 27.2, 27.3, 27.4, 27.5, 27.6, 27.7, 27.8, 27.9, or 28.0 mM NaHCO₃. In some embodiments, the diluent comprises 24.0, 24.1, 24.2, 24.3, 24.4, 24.5, 24.6, 24.7, 24.8, 24.9, 25.0, 25.1, 25.2, 25.3, 25.4, 25.5, 25.6, 25.7, 25.8, 25.9, 26.1, 26.2, 26.3, 26.4, 26.5, 26.6, 26.7, 26.8, 26.9, 27.0, 27.1, 27.2, 27.3, 27.4, 27.5, 27.6, 27.7, 27.8, 27.9, or 28.0 mM NaHCO₃.

[0519] In some embodiments, the diluent comprises 1-100 mM KHCO₃.

[0520] In some embodiments, the diluent comprises 1-99, 1-95, 1-90, 1-85, 1-80, 1-75, 1-70, 1-65, 1-60, 1-55, 1-50, 1-45, 1-40, 1-35, 1-30, 1-25, 1-20, 1-15, 1-10, 1-9, 1-8, 1-7, 1-6, 1-5, 1-4, 1-3, or 1-2 mM KHCO₃. In some embodiments, the diluent comprises 2-100, 3-100, 4-100, 5-100, 6-100, 7-100, 8-100, 9-100, 10-100, 15-100, 20-100, 25-100, 30-100, 35-100, 40-100, 45-100, 50-100, 55-100, 60-100, 65-100, 70-100, 75-100, 80-100, 85-100, 90-100, or 95-100 mM KHCO₃. In some embodiments, the diluent comprises 24.0-28.0, 24.0-27.9, 24.0-27.8, 24.0-27.7, 24.0-27.6, 24.0-27.5, 24.0-27.4, 24.0-27.3, 24.0-27.2, 24.0-27.1, 24.0-27.0, 24.0-26.9, 24.0-26.8, 24.0-26.7, 24.0-26.6, 24.0-26.5, 24.0-26.4, 24.0-26.3, 24.0-26.2, 24.0-26.1, 24.0-26.0, 24.0-25.9, 4.0-25.8, 24.0-25.7, 24.0-25.6, 24.0-25.5, 24.0-25.4, 24.0-25.3, 24.0-25.2, 24.0-25.1, 24.0-25.0, 24.0-24.9, 24.0-24.8, 24.0-24.7, 24.0-24.6, 24.0-24.5, 24.0-24.4, 24.0-24.3, 24.0-24.2, or 24.0-24.1 mM KHCO₃. In some embodiments, the diluent comprises 24.1-28.0, 24.2-28.0, 24.3-28.0, 24.4-28.0, 24.5-28.0, 24.6-28.0, 24.7-28.0, 24.8-28.0, 24.9-28.0, 25.0-28.0, 25.1-28.0, 25.2-28.0, 25.3-28.0, 25.4-28.0, 25.5-28.0, 25.6-28.0, 25.7-28.0, 25.8-28.0, 25.9-28.0, 26.0-28.0, 26.1-28.0, 26.2-28.0, 26.3-28.0, 26.4-28.0, 26.5-28.0, 26.6-28.0, 26.7-28.0, 26.8-28.0, 26.9-28.0, 27.0-28.0, 27.1-28.0, 27.2-28.0, 27.3-28.0, 27.4-28.0, 27.5-28.0, 27.6-28.0, 27.7-28.0, 27.8-28.0, or 27.9-28.0 mM KHCO₃. In some embodiments, the diluent comprises at least 24.0, 24.1, 24.2, 24.3, 24.4, 24.5, 24.6, 24.7, 24.8, 24.9, 25.0, 25.1, 25.2, 25.3, 25.4, 25.5, 25.6, 25.7, 25.8, 25.9, 26.0, 26.1, 26.2, 26.3, 26.4, 26.5, 26.6, 26.7, 26.8, 26.9, 27.0, 27.1, 27.2, 27.3, 27.4, 27.5, 27.6, 27.7, 27.8, 27.9, or 28.0 mM KHCO₃. In some embodiments, the diluent comprises at most 24.0, 24.1, 24.2, 24.3, 24.4, 24.5, 24.6, 24.7, 24.8, 24.9, 25.0, 25.1, 25.2, 25.3, 25.4, 25.5, 25.6, 25.7, 25.8, 25.9, 26.1, 26.2, 26.3, 26.4, 26.5, 26.6, 26.7, 26.8, 26.9, 27.0, 27.1, 27.2, 27.3, 27.4, 27.5, 27.6, 27.7, 27.8, 27.9, or 28.0 mM KHCO₃. In some embodiments, the diluent comprises 24.0, 24.1, 24.2, 24.3, 24.4, 24.5, 24.6, 24.7, 24.8, 24.9, 25.0, 25.1, 25.2, 25.3, 25.4, 25.5, 25.6, 25.7, 25.8, 25.9, 26.1, 26.2, 26.3, 26.4, 26.5, 26.6, 26.7, 26.8, 26.9, 27.0, 27.1, 27.2, 27.3, 27.4, 27.5, 27.6, 27.7, 27.8, 27.9, or 28.0 mM KHCO₃.

[0521] In some embodiments, the diluent comprises 1-100 mM D-glucose.

[0522] In some embodiments, the diluent comprises 1-100, 1-95, 1-90, 1-85, 1-80, 1-75, 1-70, 1-65, 1-60, 1-55, 1-50, 1-45, 1-40, 1-35, 1-30, 1-29, 1-28, 1-27, 1-26, 1-25, 1-24, 1-23, 1-22, 1-21, 1-20, 1-19, 1-18, 1-17, 1-16, 1-15, 1-14, 1-13, 1-12, 1-11, 1-10, 1-9, 1-8, 1-7, 1-6, 1-5, 1-4, 1-3, or 1-2 mM D-glucose. In some embodiments, the diluent comprises 2-100, 3-100, 4-100, 5-100, 6-100, 7-100, 8-100, 9-100, 10-100, 11-100, 12-100, 13-100, 14-100, 15-100, 16-100, 17-100, 18-100, 19-100, 20-100, 21-100, 22-100, 23-100, 24-100, 25-100, 26-100, 29-100, 28-100, 29-100, 30-100, 35-100, 40-100, 45-100, 50-100, 55-100, 60-100, 65-100, 70-100, 75-100, 80-100, 85-100, 90-100, or 95-100 mM D-glucose. In some embodiments, the diluent comprises 2-30, 3-30, 4-30, 5-30, 6-30, 7-30, 8-30, 9-30, 10-30, 11-30, 12-30, 13-30, 14-30, 15-30, 16-30, 17-30, 18-30, 19-30, 20-30, 21-30, 22-30, 23-30, 24-30, 25-30, 26-30, 27-30, 28-30, or 29-30 mM D-glucose. In some embodiments, the diluent comprises at least 1, 2, 3, 4, 5, 6, 7, 8, 9, 10, 11, 12, 13, 14, 15, 16, 17, 18, 19, 20, 21, 22, 23, 24, 25, 26, 27, 28, 29, or 30 mM D-glucose. In some embodiments, the diluent comprises at most 1, 2, 3, 4, 5, 6, 7, 8, 9, 10, 11, 12, 13, 14, 15, 16, 17, 18, 19, 20, 21, 22, 23, 24, 25, 26, 27, 28, 29, or 30 mM D-glucose. In some embodiments, the diluent comprises 1, 2, 3, 4, 5, 6, 7, 8, 9, 10, 11, 12, 13, 14, 15, 16, 17, 18, 19, 20, 21, 22, 23, 24, 25, 26, 27, 28, 29, or 30 mM D-glucose.

[0523] In some embodiments, the diluent comprises 1-100, 1-95, 1-90, 1-85, 1-80, 1-75, 1-70, 1-65, 1-60, 1-55, 1-50, 1-45, 1-40, 1-35, 1-30, 1-29, 1-28, 1-27, 1-26, 1-25, 1-24, 1-23, 1-22, 1-21, 1-20, 1-19, 1-18, 1-17, 1-16, 1-15, 1-14, 1-13, 1-12, 1-11, 1-10, 1-9, 1-8, 1-7, 1-6, 1-5, 1-4, 1-3, or 1-2 mM glucose. In some embodiments, the diluent comprises 2-100, 3-100, 4-100, 5-100, 6-100, 7-100, 8-100, 9-100, 10-100, 11-100, 12-100, 13-100, 14-100, 15-100, 16-100, 17-100, 18-100, 19-100, 20-100, 21-100, 22-100, 23-100, 24-100, 25-100, 26-100, 29-100, 28-100, 29-100, 30-100, 35-100, 40-100, 45-100, 50-100, 55-100, 60-100, 65-100, 70-100, 75-100, 80-100, 85-100, 90-100, or 95-100 mM glucose. In some embodiments, the diluent comprises 2-30, 3-30, 4-30, 5-30, 6-30, 7-30, 8-30, 9-30, 10-30, 11-30, 12-30, 13-30, 14-30, 15-30, 16-30, 17-30, 18-30, 19-30, 20-30, 21-30, 22-30, 23-30, 24-30, 25-30, 26-30, 27-30, 28-30, or 29-30 mM glucose. In some embodiments, the diluent comprises at least 1, 2, 3, 4, 5, 6, 7, 8, 9, 10, 11, 12, 13, 14, 15, 16, 17, 18, 19, 20, 21, 22, 23, 24, 25, 26, 27, 28, 29, or 30 mM glucose. In some embodiments, the diluent comprises at most 1, 2, 3, 4, 5, 6, 7, 8, 9, 10, 11, 12, 13, 14, 15, 16, 17, 18, 19, 20, 21, 22, 23, 24, 25, 26, 27, 28, 29, or 30 mM glucose. In some embodiments, the diluent comprises 1, 2, 3, 4, 5, 6, 7, 8, 9, 10, 11, 12, 13, 14, 15, 16, 17, 18, 19, 20, 21, 22, 23, 24, 25, 26, 27, 28, 29, or 30 mM glucose.

[0524] In some embodiments, the diluent comprises 25-250 mM NaCl, 0.1-20 mM KCl, 0.1-50 mM Na₂HPO₄, 0.1-50 mM NaH₂PO₄, 0.1-50 mM CaCl₂, and 0.1-50 mM MgCl₂.

[0525] In some embodiments, the diluent comprises 150 mM NaCl, 3.0 mM KCl, 0.7 mM Na₂HPO₄, 0.3 mM NaH₂PO₄, 0.79 mM MgCl₂, and 1.4 mM CaCl₂.

[0526] In some embodiments, the diluent further comprises an antioxidant. In some embodiments, the antioxidant is t-butylhydroxyquinoline (TBHQ), butylated hydroxytoluene (BHT), butylated hydroxyanisole (BHA), vitamin E, or any combination thereof. In some embodiments, the compound as described herein (e.g., compound (I) or a salt thereof, or compound (II)) is solubilized or diluted in a buffer further comprising an antioxidant, wherein the antioxidant is ascorbic acid (vitamin C), glutathione, lipoic acid, uric acid, carotenes, α-tocopherol (vitamin E), ubiquinol (coenzyme Q), or any combination thereof.

[0527] In some embodiments, the diluent comprises 25-250 mM NaCl, 0.1-20 mM KCl, 0-50 mM KH₂PO₄, 1-100 mM NaHCO₃, 0-50 mM NaH₂PO₄, 1-100 mM D-glucose, 0.1-50 mM CaCl₂, 0.1-50 mM MgCl₂, or any combinations thereof.

[0528] In some embodiments, the diluent comprises 25-250 mM NaCl, 0.1-20 mM KCl, 0-50 mM KH₂PO₄, 1-100 mM NaHCO₃, 0-50 mM NaH₂PO₄, 1-100 mM D-glucose, 0.1-50 mM CaCl₂, and 0.1-50 mM MgCl₂.

[0529] In some embodiments, the diluent comprises 127 mM NaCl, 1.0 mM KCl, 1.2 mM KH₂PO₄, 26 mM NaHCO₃, 10 mM D-glucose, 2.4 mM CaCl₂, and 1.3 mM MgCl₂.

[0530] In some embodiments, the diluent comprises 119 mM NaCl, 26.2 mM NaHCO₃, 2.5 mM KCl, 1 mM NaH₂PO₄, 1.3 mM MgCl₂, 10 mM glucose, and 2.5 mM CaCl₂.

[0531] In some embodiments, the diluent does not comprise a preservative. In some embodiments, the diluent comprises a preservative.

[0532] In some embodiments, the instructions for diluting or solubilizing the compound as described herein in the diluent comprise instructions for diluting or solubilizing the compound as described herein to a concentration of from 5-200 mg/mL in the diluent.

[0533] In some embodiments, the instructions for diluting or solubilizing the compound as described herein in the diluent comprise instructions for diluting or solubilizing the compound as described herein to a concentration of from 5-250, 5-247.5, 5-245, 5-242.5, 5-240, 5-237.5, 5-235, 5-232.5, 5-230, 5-227.5, 5-225, 5-225.5, 5-220, 5-217.5, 5-215, 5-212.5, 5-210, 5-205.5, 5-205, 5-202.5, 5-200, 5-197.5, 5-195, 5-192.5, 5-190, 5-187.5, 5-185, 5-182.5, 5-180, 5-177.5, 5-175, 5-172.5, 5-170, 5-167.5, 5-165, 5-162.5, 5-160, 5-157.5, 5-155, 5-152.5, 5-150, 5-147.5, 5-145, 5-142.5, 5-140, 5-137.5, 5-135, 5-132.5, 5-130, 5-127.5, 5-125, 5-122.5, 5-120, 5-117.5, 5-115, 5-112.5, 5-110, 5-107.5, 5-105, 5-102.5, 5-100, 5-97.5, 5-95, 5-92.5, 5-90, 5-87.5, 5-85, 5-82.5, 5-80, 5-77.5, 5-75, 5-72.5, 5-70, 5-67.5, 5-65, 5-62.5, 5-60, 5-57.5, 5-55, 5-52.5, 5-50, 5-47.5, 5-45, 5-42.5, 5-40, 5-37.5, 5-35, 5-32.5, 5-30, 5-27.5, 5-25, 5-22.5, 5-20, 5-17.5, 5-15, 5-12.5, or 5-10 mg/mL in the diluent. In some embodiments, the instructions for diluting or solubilizing the compound as described herein in the diluent comprise instructions for diluting or solubilizing the compound as described herein to a concentration of from 10-250, 15-250, 20-250, 25-250, 30-250, 35-250, 40-250, 45-250, 50-250, 55-250, 60-250, 65-250, 70-250, 75-250, 80-250, 85-250, 90-250, 95-250, 100-250, 105-250, 110-250, 115-250, 120-250, 125-250, 130-250, 135-250, 140-250, 145-250, 150-250, 155-250, 160-250, 165-250, 170-250, 175-250, 180-250, 185-250, 190-250, or 195-250, 200-250, 205-250, 210-250, 215-250, 220-250, 225-250, 230-250, 235-250, 240-250, or 245-250 mg/mL in the diluent. In some embodiments, the instructions for diluting or solubilizing the compound as described herein in the diluent comprise instructions for diluting or solubilizing the compound as described herein to a concentration of from at least 1, 2, 3, 4, 5, 6, 7, 8, 9, 10, 11, 12, 13, 14, 15, 16, 17, 18, 19, 20, 21, 22, 23, 24, 25, 26, 27, 28, 29, 30, 31, 32, 33, 34, 35, 36, 37, 38, 39, 40, 41, 42, 43, 44, 45, 46, 47, 48, 49, 50, 51, 52, 53, 54, 55, 56, 57, 58, 59, 60, 61, 62, 63, 64, 65, 66, 67, 68, 69, 70, 71, 72, 73, 74, 75, 76, 77, 78, 79, 80, 81, 82, 83, 84, 85, 86, 87, 88, 89, 90, 91, 92, 93, 94, 95, 96, 97, 98, 99, 100, 101, 102, 103, 104, 105, 106, 107, 108, 109, 110, 111, 112, 113, 114, 115, 116, 117, 118, 119, 120, 121, 122, 123, 124, 125, 126, 127, 128, 129, 130, 131, 132, 133, 134, 135, 136, 137, 138, 139, 140, 141, 142, 143, 144, 145, 146, 147, 148, 149, 150, 151, 152, 153, 154, 155, 156, 157, 158, 159, 160, 161, 162, 163, 164, 165, 166, 167, 168, 169, 170, 171, 172, 173, 174, 175, 176, 177, 178, 179, 180, 181, 182, 183, 184, 185, 186, 187, 188, 189, 190, 191, 192, 193, 194, 195, 196, 197, 198, 199, 200, 210, 211, 212, 213, 214, 215, 216, 217, 218, 219, 220, 221, 222, 223, 224, 225, 226, 227, 228, 229, 230, 231, 232, 233, 234, 235, 236, 237, 238, 239, 240, 241, 242, 243, 244, 245, 246, 247, 248, 249, or 250 mg/mL in the diluent. In some embodiments, the instructions for diluting or solubilizing the compound as described herein in the diluent comprise instructions for diluting or solubilizing the compound as described herein to a concentration of from at most 1, 2, 3, 4, 5, 6, 7, 8, 9, 10, 11, 12, 13, 14, 15, 16, 17, 18, 19, 20, 21, 22, 23, 24, 25, 26, 27, 28, 29, 30, 31, 32, 33, 34, 35, 36, 37, 38, 39, 40, 41, 42, 43, 44, 45, 46, 47, 48, 49, 50, 51, 52, 53, 54, 55, 56, 57, 58, 59, 60, 61, 62, 63, 64, 65, 66, 67, 68, 69, 70, 71, 72, 73, 74, 75, 76, 77, 78, 79, 80, 81, 82, 83, 84, 85, 86, 87, 88, 89, 90, 91, 92, 93, 94, 95, 96, 97, 98, 99, 100, 101, 102, 103, 104, 105, 106, 107, 108, 109, 110, 111, 112, 113, 114, 115, 116, 117, 118, 119, 120, 121, 122, 123, 124, 125, 126, 127, 128, 129, 130, 131, 132, 133, 134, 135, 136, 137, 138, 139, 140, 141, 142, 143, 144, 145, 146, 147, 148, 149, 150, 151, 152, 153, 154, 155, 156, 157, 158, 159, 160, 161, 162, 163, 164, 165, 166, 167, 168, 169, 170, 171, 172, 173, 174, 175, 176, 177, 178, 179, 180, 181, 182, 183, 184, 185, 186, 187, 188, 189, 190, 191, 192, 193, 194, 195, 196, 197, 198, 199, 200, 210, 211, 212, 213, 214, 215, 216, 217, 218, 219, 220, 221, 222, 223, 224, 225, 226, 227, 228, 229, 230, 231, 232, 233, 234, 235, 236, 237, 238, 239, 240, 241, 242, 243, 244, 245, 246, 247, 248, 249, or 250 mg/mL in the diluent. In some embodiments, the instructions for diluting or solubilizing the compound as described herein in the diluent comprise instructions for diluting or solubilizing the compound as described herein to a concentration of from 1, 2, 3, 4, 5, 6, 7, 8, 9, 10, 11, 12, 13, 14, 15, 16, 17, 18, 19, 20, 21, 22, 23, 24, 25, 26, 27, 28, 29, 30, 31, 32, 33, 34, 35, 36, 37, 38, 39, 40, 41, 42, 43, 44, 45, 46, 47, 48, 49, 50, 51, 52, 53, 54, 55, 56, 57, 58, 59, 60, 61, 62, 63, 64, 65, 66, 67, 68, 69, 70, 71, 72, 73, 74, 75, 76, 77, 78, 79, 80, 81, 82, 83, 84, 85, 86, 87, 88, 89, 90, 91, 92, 93, 94, 95, 96, 97, 98, 99, 100, 101, 102, 103, 104, 105, 106, 107, 108, 109, 110, 111, 112, 113, 114, 115, 116, 117, 118, 119, 120, 121, 122, 123, 124, 125, 126, 127, 128, 129, 130, 131, 132, 133, 134, 135, 136, 137, 138, 139, 140, 141, 142, 143, 144, 145, 146, 147, 148, 149, 150, 151, 152, 153, 154, 155, 156, 157, 158, 159, 160, 161, 162, 163, 164, 165, 166, 167, 168, 169, 170, 171, 172, 173, 174, 175, 176, 177, 178, 179, 180, 181, 182, 183, 184, 185, 186, 187, 188, 189, 190, 191, 192, 193, 194, 195, 196, 197, 198, 199, 200, 210, 211, 212, 213, 214, 215, 216, 217, 218, 219, 220, 221, 222, 223, 224, 225, 226, 227, 228, 229, 230, 231, 232, 233, 234, 235, 236, 237, 238, 239, 240, 241, 242, 243, 244, 245, 246, 247, 248, 249, or 250 mg/mL in the diluent.

[0534] In some embodiments, the compound as described herein (e.g., compound (I) or a salt thereof, or compound (II)) is present in the pharmaceutical composition at a concentration of the compound as described herein (e.g., compound (I) or a salt thereof, or compound (II)) is present in the pharmaceutical composition at a concentration of from 0.1 mg/mL to 250 mg/mL. In some embodiments, the compound as described herein (e.g., compound (I) or a salt thereof, or compound (II)) is present in the pharmaceutical composition at a concentration of about 0.1 mg/mL, 0.5 mg/mL, 1 mg/mL, 2 mg/mL, 2.5 mg/mL, 3 mg/mL, 4 mg/mL, 5 mg/mL, 6 mg/mL, 7 mg/mL, 8 mg/mL, 9 mg/mL, 10 mg/mL, 11 mg/mL, 12 mg/mL, 13 mg/mL, 14 mg/mL, 15 mg/mL, 16 mg/mL, 17 mg/mL, 18 mg/mL, 19 mg/mL, or 20 mg/mL. In some embodiments, the compound as described herein (e.g., compound (I) or a salt thereof, or compound (II)) is present in the pharmaceutical composition at a concentration of about 30 mg/mL, 40 mg/mL, 50 mg/mL, 60 mg/mL, 70 mg/mL, 80 mg/mL, 90 mg/mL, 100 mg/mL, 110 mg/mL, 120 mg/mL, 130 mg/mL, 140 mg/mL, 150 mg/mL, 160 mg/mL, 170 mg/mL, 180 mg/mL, 190 mg/mL, or 200 mg/mL. In some embodiments, the compound as described herein (e.g., compound (I) or a salt thereof, or compound (II)) is present in the pharmaceutical composition at a concentration of about 22.5 mg/mL, 25 mg/mL, 27.5 mg/mL, 30 mg/mL, 32.5 mg/mL, 35 mg/mL, 37.5 mg/mL, 40 mg/mL, 42.5 mg/mL, 45 mg/mL, 47.5 mg/mL, 50 mg/mL, 52.5 mg/mL, 55 mg/mL, 57.5 mg/mL, 60 mg/mL, 62.5 mg/mL, 65 mg/mL, 67.5 mg/mL, 70 mg/mL, 72.5 mg/mL, 75 mg/mL, 77.5 mg/mL, 80 mg/mL, 82.5 mg/mL, 85 mg/mL, 87.5 mg/mL, 90 mg/mL, 92.5 mg/mL, 95 mg/mL, 97.5 mg/mL, 100 mg/mL, 102.5 mg/mL, 105 mg/mL, 107.5 mg/mL, 110 mg/mL, 112.5 mg/mL, 115 mg/mL, 117.5 mg/mL, 120 mg/mL, 122.5 mg/mL, 125 mg/mL, 127.5 mg/mL, 130 mg/mL, 132.5 mg/mL, 135 mg/mL, 137.5 mg/mL, 140 mg/mL, 142.5 mg/mL, 145 mg/mL, 147.5 mg/mL, 150 mg/mL, 152.5 mg/mL, 155 mg/mL, 157.5 mg/mL, 160 mg/mL, 162.5 mg/mL, 165 mg/mL, 167.5 mg/mL, 170 mg/mL, 172.5 mg/mL, 175 mg/mL, 177.5 mg/mL, 180 mg/mL, 182.5 mg/mL, 185 mg/mL, 187.5 mg/mL, 190 mg/mL, 192.5 mg/mL, 195 mg/mL, 197.5 mg/mL, 200 mg/mL, 202.5 mg/mL, 205 mg/mL, 207.5 mg/mL, 210 mg/mL, 212.5 mg/mL, 215 mg/mL, 217.5 mg/mL, 220 mg/mL, 222.5 mg/mL, 225 mg/mL, 227.5 mg/mL, 230 mg/mL, 232.5 mg/mL, 235 mg/mL, 237.5 mg/mL, 240 mg/mL, 242.5 mg/mL, 245 mg/mL, 247.5 mg/mL, or 250 mg/mL. In some embodiments, the compound as described herein (e.g., compound (I) or a salt thereof, or compound (II)) is solubilized or diluted to a concentration of 11 mg/mL, 22 mg/mL, 33 mg/mL, 44 mg/mL, 55 mg/mL, 66 mg/mL, 77 mg/mL, 88 mg/mL, 99 mg/mL, or 100 mg/mL in the diluent.

[0535] In some embodiments, the compound as described herein (e.g., compound (I) or a salt thereof, or compound (II)) is present in the pharmaceutical composition at a concentration of from 0.1 mg/mL to 250 mg/mL, from 0.2 mg/mL to 250 mg/mL, from 0.3 mg/mL to 250 mg/mL, from 0.4 mg/mL to 250 mg/mL, from 0.5 mg/mL to 250 mg/mL, from 0.6 mg/mL to 250 mg/mL, from 0.7 mg/mL to 250 mg/mL, from 0.8 mg/mL to 250 mg/mL, from 0.9 mg/mL to 250 mg/mL, from 1.0 mg/mL to 250 mg/mL, from 1.1 mg/mL to 250 mg/mL, from 1.2 mg/mL to 250 mg/mL, from 1.3 mg/mL to 250 mg/mL, from 1.4 mg/mL to 250 mg/mL, from 1.5 mg/mL to 250 mg/mL, from 1.6 mg/mL to 250 mg/mL, from 1.7 mg/mL to 250 mg/mL, from 1.8 mg/mL to 250 mg/mL, from 1.9 mg/mL to 250 mg/mL, from 2.0 mg/mL to 250 mg/mL, from 2.1 mg/mL to 250 mg/mL, from 2.2 mg/mL to 250 mg/mL, from 2.3 mg/mL to 250 mg/mL, from 2.4 mg/mL to 250 mg/mL, from 2.5 mg/mL to 250 mg/mL, from 2.6 mg/mL to 250 mg/mL, from 2.7 mg/mL to 250 mg/mL, from 2.8 mg/mL to 250 mg/mL, from 2.9 mg/mL to 250 mg/mL, from 3.0 mg/mL to 250 mg/mL, from 3.1 mg/mL to 250 mg/mL, from 3.2 mg/mL to 250 mg/mL, from 3.3 mg/mL to 250 mg/mL, from 3.4 mg/mL to 250 mg/mL, from 3.5 mg/mL to 250 mg/mL, from 3.6 mg/mL to 250 mg/mL, from 3.7 mg/mL to 250 mg/mL, from 3.8 mg/mL to 250 mg/mL, from 3.9 mg/mL to 250 mg/mL, from 4.0 mg/mL to 250 mg/mL, from 5.0 mg/mL to 250 mg/mL, from 6.0 mg/mL to 250 mg/mL, from 7.0 mg/mL to 250 mg/mL, from 8.0 mg/mL to 250 mg/mL, from 9.0 mg/mL to 250 mg/mL, from 10 mg/mL to 250 mg/mL, from 15 mg/mL to 250 mg/mL, from 20 mg/mL to 250 mg/mL, from 25 mg/mL to 250 mg/mL, from 30 mg/mL to 250 mg/mL, from 35 mg/mL to 250 mg/mL, from 40 mg/mL to 250 mg/mL, from 45 mg/mL to 250 mg/mL, from 50 mg/mL to 250 mg/mL, from 55 mg/mL to 250 mg/mL, from 60 mg/mL to 250 mg/mL, from 65 mg/mL to 250 mg/mL, from 70 mg/mL to 250 mg/mL, from 75 mg/mL to 250 mg/mL, from 80 mg/mL to 250 mg/mL, from 85 mg/mL to 250 mg/mL, from 90 mg/mL to 250 mg/mL, from 95 mg/mL to 250 mg/mL, from 100 mg/mL to 250 mg/mL, from 105 mg/mL to 250 mg/mL, from 110 mg/mL to 250 mg/mL, from 115 mg/mL to 250 mg/mL, from 120 mg/mL to 250 mg/mL, from 125 mg/mL to 250 mg/mL, from 130 mg/mL to 250 mg/mL, from 135 mg/mL to 250 mg/mL, from 140 mg/mL to 250 mg/mL, from 145 mg/mL to 250 mg/mL, from 150 mg/mL to 250 mg/mL, from 155 mg/mL to 250 mg/mL, from 160 mg/mL to 250 mg/mL, from 165 mg/mL to 250 mg/mL, from 170 mg/mL to 250 mg/mL, from 175 mg/mL to 250 mg/mL, from 180 mg/mL to 250 mg/mL, from 185 mg/mL to 250 mg/mL, from 190 mg/mL to 250 mg/mL, from 195 mg/mL to 250 mg/mL, 200 mg/mL to 250 mg/mL, from 205 mg/mL to 250 mg/mL, from 210 mg/mL to 250 mg/mL, from 215 mg/mL to 250 mg/mL, from 220 mg/mL to 250 mg/mL, from 225 mg/mL to 250 mg/mL, from 230 mg/mL to 250 mg/mL, from 235 mg/mL to 250 mg/mL, from 240 mg/mL to 250 mg/mL, or from 245 mg/mL to 250 mg/mL.

[0536] In some embodiments, the compound as described herein (e.g., compound (I) or a salt thereof, or compound (II)) is present in the pharmaceutical composition at a concentration of from 0.1 mg/mL to 250 mg/mL, from 0.1 mg/mL to 245 mg/mL, from 0.1 mg/mL to 240 mg/mL, from 0.1 mg/mL to 235 mg/mL, from 0.1 mg/mL to 230 mg/mL, from 0.1 mg/mL to 225 mg/mL, from 0.1 mg/mL to 220 mg/mL, from 0.1 mg/mL to 215 mg/mL, from 0.1 mg/ml to 210 mg/mL, from 0.1 mg/mL to 205 mg/mL, from 0.1 mg/mL to 200 mg/mL, from 0.1 mg/mL to 195 mg/mL, from 0.1 mg/mL to 190 mg/mL, from 0.1 mg/mL to 185 mg/mL, from 0.1 mg/mL to 180 mg/mL, from 0.1 mg/mL to 175 mg/mL, from 0.1 mg/mL to 170 mg/mL, from 0.1 mg/mL to 165 mg/mL, from 0.1 mg/mL to 160 mg/mL, from 0.1 mg/mL to 155 mg/mL, from 0.1 mg/mL to 150 mg/mL, from 0.1 mg/mL to 145 mg/mL, from 0.1 mg/mL to 140 mg/mL, from 0.1 mg/mL to 135 mg/mL, from 0.1 mg/mL to 130 mg/mL, from 0.1 mg/mL to 125 mg/mL, from 0.1 mg/mL to 120 mg/mL, from 0.1 mg/mL to 115 mg/mL, from 0.1 mg/mL to 110 mg/mL, from 0.1 mg/mL to 100 mg/mL, from 0.1 mg/mL to 95 mg/mL, from 0.1 mg/mL to 90 mg/mL, from 0.1 mg/mL to 85 mg/mL, from 0.1 mg/mL to 80 mg/mL, from 0.1 mg/mL to 75 mg/mL, from 0.1 mg/mL to 70 mg/mL, from 0.1 mg/mL to 65 mg/mL, from 0.1 mg/mL to 60 mg/mL, from 0.1 mg/mL to 55 mg/mL, from 0.1 mg/mL to 50 mg/mL, from 0.1 mg/mL to 45 mg/mL, from 0.1 mg/mL to 40 mg/mL, from 0.1 mg/mL to 35 mg/mL, from 0.1 mg/mL to 30 mg/mL, from 0.1 mg/mL to 25 mg/mL, from 0.1 mg/mL to 20 mg/mL, from 0.1 mg/mL to 15 mg/mL, from 0.1 mg/mL to 10 mg/mL, from 0.1 mg/mL to 9 mg/mL, from 0.1 mg/mL to 8 mg/mL, from 0.1 mg/mL to 7 mg/mL, from 0.1 mg/mL to 6 mg/mL, from 0.1 mg/mL to 5 mg/mL, from 0.1 mg/mL to 4 mg/mL, from 0.1 mg/mL to 3.9 mg/mL, from 0.1 mg/mL to 3.8 mg/mL, from 0.1 mg/mL to 3.7 mg/mL, from 0.1 mg/mL to 3.6 mg/mL, from 0.1 mg/mL to 3.5 mg/mL, from 0.1 mg/mL to 3.4 mg/mL, from 0.1 mg/mL to 3.3 mg/mL, from 0.1 mg/mL to 3.2 mg/mL, from 0.1 mg/mL to 3.1 mg/mL, from 0.1 mg/mL to 3.0 mg/mL, from 0.1 mg/mL to 2.9 mg/mL, from 0.1 mg/mL to 2.8 mg/mL, from 0.1 mg/mL to 2.7 mg/mL, from 0.1 mg/mL to 2.6 mg/mL, from 0.1 mg/mL to 2.5 mg/mL, from 0.1 mg/mL to 2.4 mg/mL, from 0.1 mg/mL to 2.3 mg/mL, from 0.1 mg/mL to 2.2 mg/mL, from 0.1 mg/mL to 2.1 mg/mL, from 0.1 mg/mL to 2.0 mg/mL, from 0.1 mg/mL to 1.9 mg/mL, from 0.1 mg/mL to 1.8 mg/mL, from 0.1 mg/mL to 1.7 mg/mL, from 0.1 mg/mL to 1.6 mg/mL, from 0.1 mg/mL to 1.5 mg/mL, from 0.1 mg/mL to 1.4 mg/mL, from 0.1 mg/mL to 1.3 mg/mL, from 0.1 mg/mL to 1.2 mg/mL, from 0.1 mg/mL to 1.1 mg/mL, from 0.1 mg/mL to 1.0 mg/mL, from 0.1 mg/mL to 0.9 mg/mL, from 0.1 mg/mL to 0.8 mg/mL, from 0.1 mg/mL to 0.7 mg/mL, from 0.1 mg/mL to 0.6 mg/mL, from 0.1 mg/mL to 0.5 mg/mL, from 0.1 mg/mL to 0.4 mg/mL, from 0.1 mg/mL to 0.3 mg/mL, or from 0.1 mg/mL to 0.2 mg/mL.

[0537] In some embodiments, the compound as described herein (e.g., compound (I) or a salt thereof, or compound (II)) is solubilized or diluted to a concentration of at least 0.1, 0.2, 0.3, 0.4, 0.5, 0.6, 0.7, 0.8, 0.9, 1.0, 1.1, 1.2, 1.3, 1.4, 1.5, 1.6, 1.7, 1.8, 1.9, 2.0, 2.1, 2.2, 2.3, 2.4, 2.5, 2.6, 2.7, 2.8, 2.9, 3.0, 3.1, 3.2, 3.3, 3.4, 3.5, 3.6, 3.7, 3.8, 3.9, 4.0, 4.1, 4.2, 4.3, 4.4, 4.5, 4.6, 4.7, 4.8, 4.9, 5, 6, 7, 8, 9, 10, 11, 12, 13, 14, 15, 16, 17, 18, 19, 20, 21, 22, 23, 24, 25, 26, 27, 28, 29, 30, 31, 32, 33, 34, 35, 36, 37, 38, 39, 40, 41, 42, 43, 44, 45, 46, 47, 48, 49, 50, 51, 52, 53, 54, 55, 56, 57, 58, 59, 60, 61, 62, 63, 64, 65, 66, 67, 68, 69, 70, 71, 72, 73, 74, 75, 76, 77, 78, 79, 80, 81, 82, 83, 84, 85, 86, 87, 88, 89, 90, 91, 92, 93, 94, 95, 96, 97, 98, 99, 100, 101, 102, 103, 104, 105, 106, 107, 108, 109, 110, 111, 112, 113, 114, 115, 116, 117, 118, 119, 120, 121, 122, 123, 124, 125, 126, 127, 128, 129, 130, 131, 132, 133, 134, 135, 136, 137, 138, 139, 140, 141, 142, 143, 144, 145, 146, 147, 148, 149, 150, 151, 152, 153, 154, 155, 156, 157, 158, 159, 160, 161, 162, 163, 164, 165, 166, 167, 168, 169, 170, 171, 172, 173, 174, 175, 176, 177, 178, 179, 180, 181, 182, 183, 184, 185, 186, 187, 188, 189, 190, 191, 192, 193, 194, 195, 196, 197, 198, 199, 200, 210, 211, 212, 213, 214, 215, 216, 217, 218, 219, 220, 221, 222, 223, 224, 225, 226, 227, 228, 229, 230, 231, 232, 233, 234, 235, 236, 237, 238, 239, 240, 241, 242, 243, 244, 245, 246, 247, 248, 249, or 250 mg/mL in the diluent. In some embodiments, the compound as described herein (e.g., compound (I) or a salt thereof, or compound (II)) is solubilized or diluted to a concentration of at most 0.1, 0.2, 0.3, 0.4, 0.5, 0.6, 0.7, 0.8, 0.9, 1.0, 1.1, 1.2, 1.3, 1.4, 1.5, 1.6, 1.7, 1.8, 1.9, 2.0, 2.1, 2.2, 2.3, 2.4, 2.5, 2.6, 2.7, 2.8, 2.9, 3.0, 3.1, 3.2, 3.3, 3.4, 3.5, 3.6, 3.7, 3.8, 3.9, 4.0, 4.1, 4.2, 4.3, 4.4, 4.5, 4.6, 4.7, 4.8, 4.9, 5, 6, 7, 8, 9, 10, 11, 12, 13, 14, 15, 16, 17, 18, 19, 20, 21, 22, 23, 24, 25, 26, 27, 28, 29, 30, 31, 32, 33, 34, 35, 36, 37, 38, 39, 40, 41, 42, 43, 44, 45, 46, 47, 48, 49, 50, 51, 52, 53, 54, 55, 56, 57, 58, 59, 60, 61, 62, 63, 64, 65, 66, 67, 68, 69, 70, 71, 72, 73, 74, 75, 76, 77, 78, 79, 80, 81, 82, 83, 84, 85, 86, 87, 88, 89, 90, 91, 92, 93, 94, 95, 96, 97, 98, 99, 100, 101, 102, 103, 104, 105, 106, 107, 108, 109, 110, 111, 112, 113, 114, 115, 116, 117, 118, 119, 120, 121, 122, 123, 124, 125, 126, 127, 128, 129, 130, 131, 132, 133, 134, 135, 136, 137, 138, 139, 140, 141, 142, 143, 144, 145, 146, 147, 148, 149, 150, 151, 152, 153, 154, 155, 156, 157, 158, 159, 160, 161, 162, 163, 164, 165, 166, 167, 168, 169, 170, 171, 172, 173, 174, 175, 176, 177, 178, 179, 180, 181, 182, 183, 184, 185, 186, 187, 188, 189, 190, 191, 192, 193, 194, 195, 196, 197, 198, 199, 200, 210, 211, 212, 213, 214, 215, 216, 217, 218, 219, 220, 221, 222, 223, 224, 225, 226, 227, 228, 229, 230, 231, 232, 233, 234, 235, 236, 237, 238, 239, 240, 241, 242, 243, 244, 245, 246, 247, 248, 249, or 250 mg/mL in the diluent. In some embodiments, the compound as described herein (e.g., compound (I) or a salt thereof, or compound (II)) is solubilized or diluted to a concentration of 0.1, 0.2, 0.3, 0.4, 0.5, 0.6, 0.7, 0.8, 0.9, 1.0, 1.1, 1.2, 1.3, 1.4, 1.5, 1.6, 1.7, 1.8, 1.9, 2.0, 2.1, 2.2, 2.3, 2.4, 2.5, 2.6, 2.7, 2.8, 2.9, 3.0, 3.1, 3.2, 3.3, 3.4, 3.5, 3.6, 3.7, 3.8, 3.9, 4.0, 4.1, 4.2, 4.3, 4.4, 4.5, 4.6, 4.7, 4.8, 4.9, 5, 6, 7, 8, 9, 10, 11, 12, 13, 14, 15, 16, 17, 18, 19, 20, 21, 22, 23, 24, 25, 26, 27, 28, 29, 30, 31, 32, 33, 34, 35, 36, 37, 38, 39, 40, 41, 42, 43, 44, 45, 46, 47, 48, 49, 50, 51, 52, 53, 54, 55, 56, 57, 58, 59, 60, 61, 62, 63, 64, 65, 66, 67, 68, 69, 70, 71, 72, 73, 74, 75, 76, 77, 78, 79, 80, 81, 82, 83, 84, 85, 86, 87, 88, 89, 90, 91, 92, 93, 94, 95, 96, 97, 98, 99, 100, 101, 102, 103, 104, 105, 106, 107, 108, 109, 110, 111, 112, 113, 114, 115, 116, 117, 118, 119, 120, 121, 122, 123, 124, 125, 126, 127, 128, 129, 130, 131, 132, 133, 134, 135, 136, 137, 138, 139, 140, 141, 142, 143, 144, 145, 146, 147, 148, 149, 150, 151, 152, 153, 154, 155, 156, 157, 158, 159, 160, 161, 162, 163, 164, 165, 166, 167, 168, 169, 170, 171, 172, 173, 174, 175, 176, 177, 178, 179, 180, 181, 182, 183, 184, 185, 186, 187, 188, 189, 190, 191, 192, 193, 194, 195, 196, 197, 198, 199, 200, 210, 211, 212, 213, 214, 215, 216, 217, 218, 219, 220, 221, 222, 223, 224, 225, 226, 227, 228, 229, 230, 231, 232, 233, 234, 235, 236, 237, 238, 239, 240, 241, 242, 243, 244, 245, 246, 247, 248, 249, or 250 mg/mL in the diluent.

[0538] In some embodiments, the instructions for diluting or solubilizing the compound as described herein in the diluent comprise instructions for diluting or solubilizing the compound as described herein to a concentration of from 0.1 mg/mL to 200 mg/mL. In some embodiments, the instructions for diluting or solubilizing the compound as described herein in the diluent comprise instructions for diluting or solubilizing the compound as described herein to a concentration of about 0.1 mg/mL, 0.5 mg/mL, 1 mg/mL, 2 mg/mL, 2.5 mg/mL, 3 mg/mL, 4 mg/mL, 5 mg/mL, 6 mg/mL, 7 mg/mL, 8 mg/mL, 9 mg/mL, 10 mg/mL, 11 mg/mL, 12 mg/mL, 13 mg/mL, 14 mg/mL, 15 mg/mL, 16 mg/mL, 17 mg/mL, 18 mg/mL, 19 mg/mL, or 20 mg/mL. In some embodiments, the instructions for diluting or solubilizing the compound as described herein in the diluent comprise instructions for diluting or solubilizing the compound as described herein to a concentration of about 30 mg/mL, 40 mg/mL, 50 mg/mL, 60 mg/mL, 70 mg/mL, 80 mg/mL, 90 mg/mL, 100 mg/mL, 110 mg/mL, 120 mg/mL, 130 mg/mL, 140 mg/mL, 150 mg/mL, 160 mg/mL, 170 mg/mL, 180 mg/mL, 190 mg/mL, or 200 mg/mL. In some embodiments, the instructions for diluting or solubilizing the compound as described herein in the diluent comprise instructions for diluting or solubilizing the compound as described herein to a concentration of 11 mg/mL, 22 mg/mL, 33 mg/mL, 44 mg/mL, 55 mg/mL, 66 mg/mL, 77 mg/mL, 88 mg/mL, 99 mg/mL, or 100 mg/mL in the diluent.

[0539] In some embodiments, the instructions for diluting or solubilizing the compound as described herein in the diluent comprise instructions for diluting or solubilizing the compound as described herein to a concentration of from 0.1 mg/mL to 200 mg/mL, from 0.2 mg/mL to 200 mg/mL, from 0.3 mg/mL to 200 mg/mL, from 0.4 mg/mL to 200 mg/mL, from 0.5 mg/mL to 200 mg/mL, from 0.6 mg/mL to 200 mg/mL, from 0.7 mg/mL to 200 mg/mL, from 0.8 mg/mL to 200 mg/mL, from 0.9 mg/mL to 200 mg/mL, from 1.0 mg/mL to 200 mg/mL, from 1.1 mg/mL to 200 mg/mL, from 1.2 mg/mL to 200 mg/mL, from 1.3 mg/mL to 200 mg/mL, from 1.4 mg/mL to 200 mg/mL, from 1.5 mg/mL to 200 mg/mL, from 1.6 mg/mL to 200 mg/mL, from 1.7 mg/mL to 200 mg/mL, from 1.8 mg/mL to 200 mg/mL, from 1.9 mg/mL to 200 mg/mL, from 2.0 mg/mL to 200 mg/mL, from 2.1 mg/mL to 200 mg/mL, from 2.2 mg/mL to 200 mg/mL, from 2.3 mg/mL to 200 mg/mL, from 2.4 mg/mL to 200 mg/mL, from 2.5 mg/mL to 200 mg/mL, from 2.6 mg/mL to 200 mg/mL, from 2.7 mg/mL to 200 mg/mL, from 2.8 mg/mL to 200 mg/mL, from 2.9 mg/mL to 200 mg/mL, from 3.0 mg/mL to 200 mg/mL, from 3.1 mg/mL to 200 mg/mL, from 3.2 mg/mL to 200 mg/mL, from 3.3 mg/mL to 200 mg/mL, from 3.4 mg/mL to 200 mg/mL, from 3.5 mg/mL to 200 mg/mL, from 3.6 mg/mL to 200 mg/mL, from 3.7 mg/mL to 200 mg/mL, from 3.8 mg/mL to 200 mg/mL, from 3.9 mg/mL to 200 mg/mL, from 4.0 mg/mL to 200 mg/mL, from 5.0 mg/mL to 200 mg/mL, from 6.0 mg/ml to 200 mg/mL, from 7.0 mg/mL to 200 mg/mL, from 8.0 mg/mL to 200 mg/mL, from 9.0 mg/mL to 200 mg/mL, from 10 mg/mL to 200 mg/mL, from 15 mg/mL to 200 mg/mL, from 20 mg/mL to 200 mg/mL, from 25 mg/mL to 200 mg/mL, from 30 mg/mL to 200 mg/mL, from 35 mg/mL to 200 mg/mL, from 40 mg/mL to 200 mg/mL, from 45 mg/mL to 200 mg/mL, from 50 mg/mL to 200 mg/mL, from 55 mg/mL to 200 mg/mL, from 60 mg/mL to 200 mg/mL, from 65 mg/mL to 200 mg/mL, from 70 mg/mL to 200 mg/mL, from 75 mg/mL to 200 mg/mL, from 80 mg/mL to 200 mg/mL, from 85 mg/mL to 200 mg/mL, from 90 mg/mL to 200 mg/mL, from 95 mg/mL to 200 mg/mL, from 100 mg/mL to 200 mg/mL, from 105 mg/mL to 200 mg/mL, from 110 mg/mL to 200 mg/mL, from 115 mg/mL to 200 mg/mL, from 120 mg/mL to 200 mg/mL, from 125 mg/mL to 200 mg/mL, from 130 mg/mL to 200 mg/mL, from 135 mg/mL to 200 mg/mL, from 140 mg/mL to 200 mg/mL, from 145 mg/mL to 200 mg/mL, from 150 mg/mL to 200 mg/mL, from 155 mg/mL to 200 mg/mL, from 160 mg/mL to 200 mg/mL, from 165 mg/mL to 200 mg/mL, from 170 mg/mL to 200 mg/mL, from 175 mg/mL to 200 mg/mL, from 180 mg/mL to 200 mg/mL, from 185 mg/mL to 200 mg/mL, from 190 mg/mL to 200 mg/mL, or from 195 mg/mL to 200 mg/mL.

[0540] In some embodiments, the instructions for diluting or solubilizing the compound as described herein in the diluent comprise instructions for diluting or solubilizing the compound as described herein to a concentration of from 0.1 mg/mL to 200 mg/mL, from 0.1 mg/mL to 195 mg/mL, from 0.1 mg/mL to 190 mg/mL, from 0.1 mg/mL to 185 mg/mL, from 0.1 mg/mL to 180 mg/mL, from 0.1 mg/mL to 175 mg/mL, from 0.1 mg/mL to 170 mg/mL, from 0.1 mg/mL to 165 mg/mL, from 0.1 mg/mL to 160 mg/mL, from 0.1 mg/mL to 155 mg/mL, from 0.1 mg/mL to 150 mg/mL, from 0.1 mg/mL to 145 mg/mL, from 0.1 mg/mL to 140 mg/mL, from 0.1 mg/mL to 135 mg/mL, from 0.1 mg/mL to 130 mg/mL, from 0.1 mg/mL to 125 mg/mL, from 0.1 mg/mL to 120 mg/mL, from 0.1 mg/mL to 115 mg/mL, from 0.1 mg/mL to 110 mg/mL, from 0.1 mg/mL to 100 mg/mL, from 0.1 mg/mL to 95 mg/mL, from 0.1 mg/mL to 90 mg/mL, from 0.1 mg/mL to 85 mg/mL, from 0.1 mg/mL to 80 mg/mL, from 0.1 mg/mL to 75 mg/mL, from 0.1 mg/mL to 70 mg/mL, from 0.1 mg/mL to 65 mg/mL, from 0.1 mg/mL to 60 mg/mL, from 0.1 mg/mL to 55 mg/mL, from 0.1 mg/mL to 50 mg/mL, from 0.1 mg/mL to 45 mg/mL, from 0.1 mg/mL to 40 mg/mL, from 0.1 mg/mL to 35 mg/mL, from 0.1 mg/mL to 30 mg/mL, from 0.1 mg/mL to 25 mg/mL, from 0.1 mg/mL to 20 mg/mL, from 0.1 mg/mL to 15 mg/mL, from 0.1 mg/mL to 10 mg/mL, from 0.1 mg/mL to 9 mg/mL, from 0.1 mg/mL to 8 mg/mL, from 0.1 mg/mL to 7 mg/mL, from 0.1 mg/mL to 6 mg/mL, from 0.1 mg/mL to 5 mg/mL, from 0.1 mg/mL to 4 mg/mL, from 0.1 mg/mL to 3.9 mg/mL, from 0.1 mg/mL to 3.8 mg/mL, from 0.1 mg/mL to 3.7 mg/mL, from 0.1 mg/mL to 3.6 mg/mL, from 0.1 mg/mL to 3.5 mg/mL, from 0.1 mg/mL to 3.4 mg/mL, from 0.1 mg/mL to 3.3 mg/mL, from 0.1 mg/mL to 3.2 mg/mL, from 0.1 mg/mL to 3.1 mg/mL, from 0.1 mg/mL to 3.0 mg/mL, from 0.1 mg/mL to 2.9 mg/mL, from 0.1 mg/mL to 2.8 mg/mL, from 0.1 mg/mL to 2.7 mg/mL, from 0.1 mg/mL to 2.6 mg/mL, from 0.1 mg/mL to 2.5 mg/mL, from 0.1 mg/mL to 2.4 mg/mL, from 0.1 mg/mL to 2.3 mg/mL, from 0.1 mg/mL to 2.2 mg/mL, from 0.1 mg/mL to 2.1 mg/mL, from 0.1 mg/mL to 2.0 mg/mL, from 0.1 mg/mL to 1.9 mg/mL, from 0.1 mg/mL to 1.8 mg/mL, from 0.1 mg/mL to 1.7 mg/mL, from 0.1 mg/mL to 1.6 mg/mL, from 0.1 mg/mL to 1.5 mg/mL, from 0.1 mg/mL to 1.4 mg/mL, from 0.1 mg/mL to 1.3 mg/mL, from 0.1 mg/mL to 1.2 mg/mL, from 0.1 mg/mL to 1.1 mg/mL, from 0.1 mg/mL to 1.0 mg/mL, from 0.1 mg/mL to 0.9 mg/mL, from 0.1 mg/mL to 0.8 mg/mL, from 0.1 mg/mL to 0.7 mg/mL, from 0.1 mg/mL to 0.6 mg/mL, from 0.1 mg/mL to 0.5 mg/mL, from 0.1 mg/mL to 0.4 mg/mL, from 0.1 mg/mL to 0.3 mg/mL, or from 0.1 mg/mL to 0.2 mg/mL.

[0541] One aspect of the disclosure relates to kits including the compound as described herein. The kits can further include one or more additional therapeutic regimens or agents.

[0542] Also disclosed herein, in some embodiments, are kits and articles of manufacture for use with one or more methods described herein. Such kits include a carrier, package, or container that is compartmentalized to receive one or more containers such as vials, tubes, and the like, each of the container(s) comprising one of the separate elements to be used in a method described herein. Suitable containers include, for example, bottles, vials, syringes, and test tubes. In one embodiment, the containers are formed from a variety of materials such as glass or plastic.

[0543] The articles of manufacture provided herein contain packaging materials. Examples of pharmaceutical packaging materials include, but are not limited to, blister packs, bottles, tubes, bags, containers, bottles, and any packaging material suitable for a selected formulation and intended mode of administration and treatment.

[0544] For example, the container(s) include the composition of the invention, and optionally in addition with therapeutic regimens or agents disclosed herein. Such kits optionally include an identifying description or label or instructions relating to its use in the methods described herein.

[0545] A kit typically includes labels listing contents and/or instructions for use, and package inserts with instructions for use. A set of instructions will also typically be included.

[0546] In some embodiments, a label is on or associated with the container. In one embodiment, a label is on a container when letters, numbers or other characters forming the label are attached, molded or etched into the container itself; a label is associated with a container when it is present within a receptacle or carrier that also holds the container, e.g., as a package insert. In one embodiment, a label is used to indicate that the contents are to be used for a specific therapeutic application. The label also indicates directions for use of the contents, such as in the methods described herein.

### EXAMPLES

[0547] The present disclosure will be more specifically illustrated by the following Examples. However, it should be understood that the present disclosure is not limited by these examples in any manner.

### Example 1: Mechanism of TANGO (Targeted Augmentation of Nuclear Gene Output)

[0548] TANGO uses ASOs to specifically increase protein expression by targeting naturally occurring non-productive alternative splicing events. TANGO can reduce non-productive messenger RNAs (mRNA), which are normally targeted for degradation by nonsense-mediated mRNA decay (NMD) as shown in FIGS. 1A and 1B. In turn, TANGO can increase productive mRNA and protein. TANGO can specifically increase expression of canonical target mRNA and full-length protein in tissues with endogenous gene expression. As these events are naturally occurring, TANGO can upregulate the wild-type alleles in the context of autosomal dominant haploinsufficiency, thus providing a potentially unique opportunity to treat diseases.

### Example 2: Experimental Administration of Antisense Oligomer ASO-22 to Mice

[0549] Mice were administered a single intracerebroventricular (ICV) injection of ASO-22 or vehicle (PBS) at postnatal day P2 or P14. Mice were monitored for survival out to 14 weeks. To monitor for seizures, mice are implanted with an 8201-EEG Headmount (Pinnacle Technology, Inc., Lawrence, KS) and seizure activity was continuously monitored from P22-P46. ASO-22 Measurement: ASO-22 levels were measured by Liquid Chromatography Mass Spectrometry (LCMS) SCN1A gene expression measurement Productive Scn1a mRNA transcripts were measured using TaqMan® qPCR assays. Na_{V}1.1 Protein measurement: Na_{V}1.1 protein was measured using a Mesoscale Discovery electrochemiluminescence (MSD-ECL) assay which utilizes Na_{V}1.1 expression in wild-type mouse brain tissue lysates as a standard.

### Example 3: Monitoring Survival of Mice after ASO-22 Administration at Post-Natal Day 2

[0550] Mice groups were monitored for survival after ASO-22 was administered. FIG. 2 shows an exemplary survival curve demonstrating 100% long term survival benefit provided by a SCN1A-targeting ASO (termed as “ASO-22”) in Dravet mouse model. WT and heterozygous Dravet mice (+/−), F1 offspring from 129S-Scn1a^{tm1Kea}×C57BL/6J crosses, received a single dose ICV injection of 20 μg PBS or ASO-22 blindly on postnatal day 2, and their survival was monitored until 14 weeks. As depicted, Dravet mice receiving PBS treatment started to die from about postnatal day 20, whereas all mice of other three groups, including Dravet mice receiving ASO-22 treatment group, survived at least 70 days. Kaplan-Meier curve showing DS and WT littermate mice monitored to 14 weeks for survival. Administration of ASO-22 significantly (p<0.0001; ****=p<0.0001 on FIG. 2) improved survival in the Dravet mouse model. 33/34 survived up to 14 weeks, compared with 14/62 animals in PBS-treated group. ASO-22 administration at P2 was able to prevent SUDEP (Sudden Unexpected Death in Epilepsy) in the DS mouse model.

### Example 4: Monitoring of Seizures in Mice

[0551] EEG recording was performed on the mice to monitor seizures. FIG. 3 shows experimental design for the EEG seizure monitoring study in DS mice (n=21/group) and their WT littermates (n=11-12/group). Mice received a 20 μg ICV injection of ASO-22 or PBS vehicle at P2, underwent surgery for EEG head mounts at P20, and were continuously monitored by EEG from P22 to P46. WT mice injected with ASO-22 had normal EEGs throughout the monitoring period (data not shown). FIG. 4A shows representative traces from three channels during a seizure event recorded in different parts of the brain of a PBS-injected DS mouse, including the frontal cortex, the hippocampus, and the Parietal cortex. As shown in FIG. 4B, the number of recorded spontaneous seizures in the mice were shown to be reduced significantly in DS mice demonstrating a robust seizure freedom. In all mice, seizures were predominantly generalized as observed by the similar data obtained in the different areas of the brain. FIG. 4C is a summary of effect of ASO-22 on total number of spontaneous seizures (generalized and focal) recorded between P22 and P46 in DS mice dosed with PBS (n=21) or ASO-22 (n=21). *Indicates p<0.05. Additionally, as shown in FIG. 4D, the number of seizure-free mice increased after ASO-22 administration at P2, while the number of mice having 2 or more seizures decreased compared to control. Wild-type mice did not have any seizure regardless of treatment. A 50% increase (76% vs 48%) in the number of mice that experienced no seizures following administration of ASO-22 at postnatal day 2 and monitored by EEG between postnatal day 22 and day 46. Reductions in the number of mice that experienced two or more seizures following administration of ASO-22 at postnatal day 2 compared to placebo (14% vs 38%). An 80% reduction (3 vs 15) in the average number of spontaneous seizures detected between postnatal day 22 and day 46 after treatment with ASO-22 compared to placebo (p<0.05). ASO-22 administration at P14 was able to significantly reduces SUDEP in the DS mouse model. Furthermore, administration of ASO-22 significantly prolonged latency to first seizure in DS mice during the recording period (p<0.05, FIG. 4E). There were non-statistically significant trends suggesting increased numbers of seizure-free DS mice (48% PBS vs 76% ASO-22) and decreased numbers of DS mice having 2 or more seizures (38% PBS vs 14% ASO-22) over the assessment period following ASO-22 administration.

### Example 5: Detection of ASO-22 Exposure and Protein Expression Levels in Mice Brains

[0552] Mice brains were collected in order to detect exposure of the ASO to the brain tissue as well as detect the protein expression levels in the brain tissue. FIG. 5A shows the experiment timeline. Wild-type (WT) or heterozygous Dravet mice (HET) F1 mice from 129S-Scn1a^{tm1Kea}×C57BL/6J crosses were subjected to an intracerebroventricular (ICV) injection at postnatal day 2 of 20 μg of ASO-22 or PBS. The brains of the mice were collected at 7 weeks from a subset of mice in all mice groups. A second collection of brains was performed at 14 weeks from another subset of mice in all mice groups. The brain tissues were shown to have a robust and long-lasting exposure to ASO-22 (˜13 μg/g at 7 weeks; FIG. 5B and ˜8 μg/g at 14 weeks; FIG. 5E) as measured using Liquid Chromatography-Mass Spectrometry (LC-MS). The expression levels of Scn1a productive transcript were increased after ASO-22 administration by ˜1.5-2 fold in both WT and DS mice at 7 weeks (FIG. 5C) and 14 weeks (FIG. 5F). FIG. 5D (7 weeks) and FIG. 5G (14 weeks) shows an increase in Na_{V}1.1 protein in ASO-22 treated DS mice. Na_{V}1.1 protein increased in ASO-22 treated DS mouse brains to levels indistinguishable from PBS-treated WT brains at 7 weeks and 14 weeks. Na_{V}1.1 protein in the brains of ASO-22 injected WT animals also increased over PBS treated WT mice with no obvious adverse effects.

### Example 6: Monitoring Survival of Mice after ASO-22 Administration at Post-Natal Day 2

[0553] Mice groups were monitored for survival after ASO-22 was administered on P14. FIG. 6A shows a study design timeline with the mice injected on P14 and monitored until P90. FIG. 6B shows an exemplary survival curve demonstrating long term survival benefit provided by a SCN1A targeting ASO in Dravet mouse model. WT and heterozygous Dravet mice (+/−), F1 offspring from 129S-Scn1a^{tm1Kea}×C57BL/6J crosses, received a single dose ICV injection of 60 μg PBS or ASO blindly on postnatal day 14 (which was around the time of disease onset), and their survival was monitored until P90. As depicted, Dravet mice receiving PBS treatment started to die from about postnatal day 20 resulting in a lower survival rate at P90 than the DS mouse treated with ASO-22. 47/74 of the PBS treated DS mice survived up to P90 whereas 45/53 (p<0.005) of the DS mice treated with ASO-22 survived up to P90.

### Example 7: Detection of ASO-22 Exposure and Protein Expression Levels in Mice Brains

[0554] Mice brains were collected in order to detect exposure of the ASO to the brain tissue as well as detect the protein expression levels in the brain tissue. FIG. 7A shows the experiment timeline. Wild-type (WT) or heterozygous Dravet mice (HET) F1 mice from 129S-Scn1a^{tm1Kea}×C57BL/6J crosses were subjected to an intracerebroventricular (ICV) injection at postnatal day 14 of 60 μg of ASO-22 or PBS. The brains of the mice were collected at P35 from a subset of mice in all mice groups. A second collection of brains was performed at P90 from another subset of mice in all mice groups. The brain tissues were shown to have a robust and long-lasting exposure to ASO-22: ˜ 36 μg/g at P35 (FIG. 7A) and ˜10 μg/g at P90 (FIG. 7D) as measured using LCMS. The expression levels of Scn1a productive transcript were increased after ASO-22 administration by ˜1.5-fold in both WT and DS mice at P90 (FIG. 7E) with no significant change at P35 (FIG. 7B). FIG. 7F shows an increase in Na_{V}1.1 proteins in ASO-22 treated DS mice at P90 with no significant change at P35 (FIG. 7C). Na_{V}1.1 protein increased in ASO-22 treated DS mouse brains to levels indistinguishable from PBS-treated WT brains at P90. Na_{V}1.1 protein in the brains of ASO-22 injected WT animals also increased over PBS treated WT mice with no obvious adverse effects.

### Example 8: Administration of ASOs to Cynomolgus Monkeys

[0555] 2- to 3-year-old naïve cynomolgus monkeys were administered a single bolus intrathecal lumbar (IT-L) injection of artificial cerebrospinal fluid (aCSF) or one or two dose levels of ASO-22 antisense oligomer (ASO) on the first study day. Two dose levels of an optimized ASO that was active in targeting a nonproductive alternatively splicing event in Scn1a in rodent were evaluated in cynomolgus monkeys for safety, brain biodistribution, target engagement and pharmacodynamics. After a single intrathecal lumbar bolus injection (IT-L) of the ASO, animals were sacrificed and ASO, Scn1a mRNA and Na_{V}1.1 protein levels were measured on Day 3 (48 hours post dose) and on Day 29 (28 days post dose). FIG. 8 shows the treatment, dosing and number of animals used for an exemplary study.

[0556] After dosing, the animals underwent a standard clinical and neurological observation and blood samples were collected. CSF and brains were collected at necropsy. Separate punches of various regions were collected for ASO-22 concentration levels, gene expression and protein expression measurements. ASO-22 levels were measured by liquid chromatography mass spectrometry (LCMS) in tissues and by hybridization enzyme-linked immunosorbent assay (HELISA) in plasma and CSF. Productive and non-productive (NMD-inducing) Scn1a mRNA transcripts were measured using TaqMan® qPCR in order perform SCN1A gene expression measurements. Na_{V}1.1 protein was measured using a Mesoscale Discovery Electrochemiluminescence (MSD-ECL) assay which utilizes a recombinant fragment of Na_{V}1.1 as a standard. The ASO was well tolerated at both dose levels with no changes on physical and neurological exams, no changes in food intake, body weight, hepatic function or platelet counts, no complement system activation, and no abnormal histopathology was observed in all tissues examined.

### Example 9: Detection of ASO-22 ASO in the Brain Tissues of Cynomolgus Monkeys

[0557] The brains of 2- to 3-year-old naïve cynomolgus monkeys were analyzed for levels of the ASO-22 ASO using LCMS. Cynomolgus monkeys were sacrificed at Study Day 3 and Study Day 29 to observe the levels of ASO-22 in various brain tissues for the various doses. FIG. 9A shows the levels of ASO-22 in various area of the brains of the monkeys on Study Day 3. At the low dose, ASO-22 exposure was below the limit of quantitation (BLQ) in most of the brain regions. At the high dose, the ASO-22 was detectable, primarily detected in the cortex and the cerebellum. FIG. 9B shows the levels of the ASO-22 at Study Day 29. At the low dose, the brain tissue exposure was BLQ in most regions of the brain. For the high dose level, exposure in the cortical brain regions was generally higher than in the deeper structures and the level of exposure was generally increased from Day 3. ASO-22 is observed to distribute broadly in the non-human primate brain at the higher dose level.

### Example 10: Detection of Na_{V}1.1 Expression in the Brain Tissues of Cynomolgus Monkeys

[0558] The brains of 2-3-year-old naïve cynomolgus monkeys were analyzed for levels of the Na_{V}1.1 expression. Cynomolgus monkeys were sacrificed at Study Day 3 and Study Day 29 to observe the expression levels of Na_{V}1.1 in various brain tissues for the various doses. FIG. 10A shows the levels of ASO-22 in various area of the brains of the monkeys on Study Day 3. All brain regions assessed had measurable levels of Na_{V}1.1, with midbrain, motor cortex, occipital cortex and motor cortex being the highest. No or marginal change in Na_{V}1.1 levels in brain tissues were observed at the low or high dose levels of ASO-22. FIG. 10B shows the levels of the ASO-22 at Study Day 29. No or marginal change in Na_{V}1.1 level in brain tissues were observed at the low dose of ASO-22. At the high dose of ASO-22, Na_{V}1.1 protein level increased by 1.2- to 3-fold in motor cortex, occipital cortex, parietal cortex, and prefrontal cortex compared to aCSF treated animals.

### Example 11: Detection of SCN1A Expression in the Brain Tissues of Cynomolgus Monkeys

[0559] The brains of 2- to 3-year-old naïve cynomolgus monkeys were analyzed for levels of the SCN1A expression. Levels of productive SCN1A gene and levels of total SCN1A gene expression were determined in order to evaluate the target engagement of the ASO-22 ASO. Cynomolgus monkeys were sacrificed at Study Day 3 and Study Day 29 to observe the expression levels of SCN1A in various brain tissues for the various doses. FIG. 11A shows the percentage of productive SCN1A gene expression/total SCN1A gene expression in various area of the brains of the monkeys on Study Day 3. No significant changes in percentage of productive gene expression were observed for either dosage compared to the control aCSF expression at Day 3 for any of the brain regions, indicating that limited target engagement had occurred. FIG. 11B shows the percentage of productive SCN1A gene expression/total SCN1A gene expression in various area of the brains of the monkeys on Study Day 29. Significant target engagement as determined by measurement of productive SCN1A gene expression/total SCN1A gene expression was observed in prefrontal cortex, parietal cortex, occipital cortex and limbic lobe on Day 29 at the high dose of ASO-22.

### Example 12: Detection of ASO-22 ASO in the Plasma and CSF of Cynomolgus Monkeys

[0560] The plasma and CSF of 2- to 3-year-old naïve cynomolgus monkeys were analyzed for levels of ASO-22 after the intrathecal administration of ASO-22. FIG. 12A shows the plasma pharmacokinetics of the ASO-22 in the monkeys for low and high doses. Plasma levels were observed at timepoints from 1 hour from the administration up until 29 days from administration. ASO-22 reached mean peak plasma levels approximately 1 hour (first time of collection) for the low dose and 2 hours for the high dose. The concentrations declined in a biphasic manner. Peak and total exposures of each compound increased with increasing dose. Measured levels of ASO-22 in pre-dose and aCSF-dosed samples were below the limit of quantification of each assay.

[0561] FIG. 12B shows the levels of ASO-22 in the cynomolgus monkey CSF on day 3 and day 29. At Day 3, the observed CSF exposure in the low and high dose groups were similar. CSF ASO-22 levels decreased markedly from Day 3 to Day 29 for both doses suggesting a transition from distribution to clearance phase during this period. Mean exposure levels were variable, but slightly higher in the high compared to the low dose group at Day 29.

### Example 13: Identification of NMD-Inducing Exon Inclusion Events in SCN1A Transcripts by RNAseq Using Next-Generation Sequencing (NGS)

[0562] Whole transcriptome shotgun sequencing was carried out using next-generation sequencing to reveal a snapshot of transcripts produced by the SCN1A gene to identify NIE inclusion events. For this purpose, polyA+ RNA from nuclear and cytoplasmic fractions of HCN (human cortical neurons) was isolated and cDNA libraries constructed using Illumina's TruSeq Stranded mRNA library Prep Kit. The libraries were pair-end sequenced resulting in 100-nucleotide reads that were mapped to the human genome (February 2009, GRCh37/hg19 assembly). Briefly, mapped reads visualized using the UCSC genome browser (operated by the UCSC Genome Informatics Group (Center for Biomolecular Science & Engineering, University of California, Santa Cruz, 1156 High Street, Santa Cruz, CA 95064) and described by, e.g., Rosenbloom, et al., 2015, “The UCSC Genome Browser database: 2015 update,” Nucleic Acids Research 43, Database Issue, doi: 10.1093/nar/gku1177) and the coverage and number of reads can be inferred by the peak signals. The height of the peaks indicates the level of expression given by the density of the reads in a particular region. The upper panel shows a graphic representation of the SCN1A gene to scale. The conservation level across 100 vertebrate species is shown as peaks. The highest peaks correspond to exons (black boxes), while no peaks are observed for the majority of the introns (lines with arrow heads). Peaks of conservation were identified in intron 20 (NM_006920), shown in the middle panel. Inspection of the conserved sequences identified an exon-like sequence of 64 bp (bottom panel, sequence highlighted in grey) flanked by 3′ and 5′ splice sites (underlined sequence). Inclusion of this exon leads to a frameshift and the introduction of a premature termination codon in exon 21 rendering the transcript a target of NMD.

[0563] Exemplary SCN1A gene, pre-mRNA, exon, and intron sequences are summarized in Table 1. The sequence for each exon or intron is summarized in Table 2.

TABLE 1
List of target SCN1A gene and pre-mRNA sequences.

| Species | SEQ ID NO: | Sequence Type |
|---|---|---|
| Human | SEQ ID NO: 1 | SCN1A gene (NC_000002.12) |
| | SEQ ID NO: 2 | SCN1A pre-mRNA (encoding e.g., |
| | | Scn1a mRNA NM_006920.5) |
| | SEQ ID NO: 3 | Exon 20 gene |
| | SEQ ID NO: 4 | Intron 20 gene |
| | SEQ ID NO: 5 | Exon 21 gene |
| | SEQ ID NO: 6 | Exon 20x gene |
| | SEQ ID NO: 7 | Exon 20 pre-mRNA |
| | SEQ ID NO: 8 | Intron 20 pre-mRNA |
| | SEQ ID NO: 9 | Exon 21 pre-mRNA |
| | SEQ ID NO: 10 | Exon 20x pre-mRNA |
| Mouse | SEQ ID NO: 11 | SCN1A gene (NC_000068.7) |
| | SEQ ID NO: 12 | SCN1A pre-mRNA (encoding e.g., |
| | | Scn1a mRNA NM_001313997.1) |
| | SEQ ID NO: 13 | Exon 21 gene |
| | SEQ ID NO: 14 | Intron 21 gene |
| | SEQ ID NO: 15 | Exon 22 gene |
| | SEQ ID NO: 16 | Exon 21x gene |
| | SEQ ID NO: 17 | Exon 21 pre-mRNA |
| | SEQ ID NO: 18 | Intron 21 pre-mRNA |
| | SEQ ID NO: 19 | Exon 22 pre-mRNA |
| | SEQ ID NO: 20 | Exon 21x pre-mRNA |

TABLE 2
Sequences of target exon or intron in SCN1A pre-mRNA transcripts.

| SEQ ID | | |
|---|---|---|
| NO: | Sequence Type | Sequence |
| SEQ ID | Exon 20 pre- | GUUUCAUUGGUCAGUUUAACAGCAAAUGCCUUGGGUUACUCAGAACUUGGAGCCAUCA |
| NO: 7 | mRNA | AAUCUCUCAGGACACUAAGAGCUCUGAGACCUCUAAGAGCCUUAUCUCGAUUUGAAGG |
| | | GAUGAGG |
| SEQ ID | Intron 20 pre- | guaagaaaaaugaaagaaccugaaguauuguauauagccaaaauuaaacuaaauuaaa |
| NO: 8 | mRNA | uuuagaaaaaggaaaaucuaugcaugcaaaaggaauggcaaauucuugcaaaauugcu |
| | | acuuuauuguuuuaucuguugcauauuuacuucuaggugauaugcaagagaaauaggc |
| | | cucucuugaaaugauauaauaucauuuaucugcugugcuuauuuaaaugacuuuauuu |
| | | uccuaauccaucuugggaguuuccuuacaaaucuauauacaaaaaaaagcugaugcau |
| | | uauuaaaguacuauguguaaugauauaaugguaaucuaaaguaaauucuauaucacgg |
| | | uacuuauucuuugugaugauauacuguacuuaacgaguuuuccugaaaauaaugugaa |
| | | ucacacaugugccuaaguaugaguguuaagaaaaaaaugaaaggaguuguuaaaacuu |
| | | uugucuguauaaugccaaaguuugcauuauuugaauauauucaagauuagaugguuag |
| | | auauuaaguguugacugaauuuauaaaacuaguaauacuaacuuaaagauuacauaca |
| | | aauccacaucauuuuuauaacaauaaaguaaaacacuuauaaugaacagaaaauauag |
| | | uuuugacucauuacuauagguaauuuauacauuaaccuuaacuugcaucuuauugguc |
| | | agagucacacaaaauguuauuuuauccuuuucaaagaugcaauaaucauuuuccauca |
| | | ugcauaacagauuagaaauuuugccauuauugacuuauuuuccaugccuuuuuuuacg |
| | | gcaugaagcauuaguuuauagauauauaauauaaaaaauuaguucugcuuuuuuuuaa |
| | | aaaaaaauauuaucaaaacaaaacacugaauugugugauuccaauagaaaaacacugc |
| | | ucuuucaccuccuaagguguaguuacuuuuauggaaacuaagcuguauuuguagacuu |
| | | ccauuugcacuuuguagauuguuuauagccuuauguucucuucucaagucuuauuaua |
| | | aaugucacuuuguaagaacguaggacuugucuucgauuucccuaacauauaugaaaac |
| | | uuuguccucauuaucgacaacucagaacaauauaauacaaguaguccucuuuuauuuc |
| | | ucacagagagccucaaauuuucaccaaaauguuaacagaaauuaucucugggguguau |
| | | aagaauuaagucuguuuuccaauuaaaugucacuuuguuuuguuucagacuggcaguu |
| | | ucaguucuggagaaaaaaaaugucauuuguguacauucuacuugaaaacauguugccu |
| | | gaaucaaaauaauauauuuuauauggcuugugaaaucugaacaaugcuaaacauuuga |
| | | aaauauuauaaaccuuuuacauuugaccauuugaaaguuuauuaaguucauuggucaa |
| | | gugcucagauauuuccauacauuacacuucauuucuauaaaaaagcugaucuuaucgg |
| | | uauacuuuuaauuuucucagaaauaaccauaucuauaauuauuaaucaauaaugccuu |
| | | uuauauuaaaagagguuaguuuuugaaacuuggaguuuuagacauaaaauccuuauaa |
| | | augcugauagugauauaacuaauaguuuaaauggucagauuuaugaauauggcucuau |
| | | uccucauaaugacaacauacacacagcacuaaaaugacuaaucucuucaauacguguu |
| | | uggcauuguagagucaaaauaacguuauaauugauucuauuuuuuauacuucuagugu |
| | | uuggauauuuuauuuuguaaaaauauaaucaugaaugauggugagguuggauauaaga |
| | | augaugauuaugauugggaagugagauuugaacaugcucagaaacucucauuuaauuc |
| | | uuugcccuagcagcauaaaaucacaauagcugcgucaaagcguaacucaggcacucau |
| | | uuuauuuuuguuguucuguuauuuuuucaaagcaugugcuuuuaugcaacauuacuga |
| | | auaaagcauguuguacagugcuugauaagaaguuagaaaguaacaaauaaauuaucau |
| | | cacguugcacuuuguguuuugcauguuuuaugcacauuucuggcugacagcuuuuaaa |
| | | cauuuauuguauuucaaauuuccaguccaagauuuuucaacuuguaaaauuaaacuga |
| | | gugaauugaugucgugaauaucuaggguaaaauaaaauuuguguuuaaauuuguauuu |
| | | uuaauuuccuaaccuaggaaaucuuaaauaccuucuuuuucaaaagaacucaagucuu |
| | | aauggauagggaaacagacggagagcaucaugaacaaaaaguaacaccaaauguucug |
| | | ucauaucagauuucuaacuaauaacaaacuauauauuucuauuuuguauaggauaauc |
| | | uugcuccaacuuggaugggguggagcgcugguuccuccccugagcccuuuauuauggg |
| | | uacuguauuaccccuuuugcuaccuuuaauccuugcacugugacuuauguguagugcg |
| | | gugagcgagcggauugggaagcguacuauuauugcaccacaguagggaaaauacauua |
| | | uuuacauccuaauccccucuuuucaauugucuuaaauuucauuugaaaaaaaaaaaaa |
| | | ccuuuaugaauuuacccucuguggauuuuaaccccaaugguugauaucuuuauuaagu |
| | | uucauugaauaugauuuaguuauguguauauggaguuauccaucuuuggpggagauua |
| | | cuggauuggugagggcgggggacccugguguagaaugauuaugugaaaaaacaauuua |
| | | acuuguuaagcucaugauacuguuugaggcauacagccccugcuguuuaguacauugg |
| | | ucuggguccugaaaauuaccaguuagauaccaucaguugauuauugauauguaugagc |
| | | agauacuagggugcaauauuucagguuucauaagacugguauugauugugaccacucu |
| | | cauuuuuuauuguguaaguucauaugggguuauuuucaaaauguuaacaaggcaaaaa |
| | | uauauuaagaaauaguugaauaagcacaugugaauuguguuguaaacaaaaaguuaga |
| | | auaaaaaaauccacuuauuugaauuaugcagaauagaauacauaccuagaaauaaaac |
| | | aaaaacgucuuaucaugaguauuaagauaaaauuuaaggcauaaacucacuucuuaga |
| | | auaaguaacucccaacuaacuuucuaggauuuuaaaacauaacacagugaaaacauac |
| | | auaaacauaacucuacauuuuauuuauucuuaaaguuuaaguguauuauacaagaaga |
| | | agaguuuauauucgagagacagaaaaagucagaauuuuuguuuggaucaccaauauau |
| | | cauagcuuacaaaaaaacugucuuaauuaaaacccacaacauaauuuuuuuagauuuu |
| | | uaagaaagauucuauuuauucuucuuuauacuuaaaaauggaugauuccuacuuugcc |
| | | cacuuuuauuuuuauuucacauagauuuucuuuauuucuauuagagaagcacuagaau |
| | | ucaugaauaguguugauuugaaguucaaaguaauuaauucagauaaaaagacauuucu |
| | | gcauguaugaaaauuuucuaaugugaauuugcauauuuaauuaucaauccuucauuua |
| | | guguagacuuauuuuuaaaaaugcagguaaugaaccagaaauagaauugguugugcua |
| | | gaguagagaaacuuuauuugaugauuguuuugaaaaaaaagcuucugagaagaaacaa |
| | | ccucuaguacaguauuaauucauuaagauagcuccuuucucagacauuuccuuucaug |
| | | uagccugaaaguucaauuugaaauuuguucuuucccaauuuauucagacuaauucugc |
| | | cuacuuucuucccccccauaagaaccaauuacugcagcuuuauugagacugaaaaaag |
| | | uuaauacaccuccuucuuugcugaaccaaggaauggcuuggaacucuugcgaaaagac |
| | | aaucuuuucuaugaucuuucauugucuaauuuaauacaucauaaauaugacuauagcu |
| | | uuguauaauaaacuccccaauacugugcccagauguuuucuaagauaaaguuauuuua |
| | | uguucacaaaaaaaauaaaacuuuucucugggccaaauguaugccaacuuugcaaauc |
| | | auauccugaagugcacugcugcagaguacaugcuugcgucauaaauuccauagaguuc |
| | | gcuuuaacucuaaaucaauccccaguuucaaaguaaaccucucaaacauauuaccuaa |
| | | gcacaaacuucuccccugugcucaguuccuuaauuauucucaucccauauucagaaau |
| | | aacauuuaaaaauuaugcuuugaucaauaaauacuaaucuaaacuuugcuucauuaac |
| | | ccauucauuuuuugucaaccauuauuuuauuccuauauucaaagcucucugguauguu |
| | | cuuauauucaagacacucaaggccccuggaagauucacgaacauauguuugcaucuua |
| | | aauuuuuagaaaaucuuacaaucugucaggauuacacugaacucuaguacagaguaau |
| | | auggguaccagauaagugggagcaacucuuccacguagacuggaaacagcacuaaaug |
| | | cuauuuauaggcuacuuucugaacuuaacuuguuuuaaccucauuuuucucauaugcc |
| | | aaaugagaacgcaauacugaauuaucuguacaguucuguucaguacuagaauucugau |
| | | ucuugaauucaaaggggaaaacauuccucuuuauuuuggaggcuaaacugggggacaa |
| | | aguuaggcuccaugaaagaagugcuauuugaacuaaagccuuuaagaggggagaguau |
| | | uucagaagaggagcuauuagacaaggaauuucaauguaaauggcaucucaaucaccug |
| | | gcaauuauauuagcacacgguuauuauauuaauugaaguggcaugaaguauagaugac |
| | | cagggaaguuaaaacuggaaauauagauuguggagugaugugaauaccaagguaagaa |
| | | aaauauuuguuaguuaccagagagccaauaaauaacuuucaagugggacuuggggaag |
| | | auuaguucaucuuacauagauuaaaugaaggagaagguuaggagacagaugacagugc |
| | | aaguaugaaauaacagagcgcaguucuagguggugacugugagaauggaaaagaggug |
| | | gcaaagcugagaaacguuucaaagaaaaaaugugagacagguaaugugaaaagaaaau |
| | | cgagaaauagguauagauaaucaguguucugcucauacucuaaauuggguguugaagg |
| | | caaaauacguauuuuaauuaguacucuguguauacacacuagaaacagcauuguaauc |
| | | uggauaguggacaaaauauucagaaaagaagggaaauaguaacuugauuucaauuucc |
| | | aaaucucuaaucugaaagaaaucuaauucuauucauccauuuaaaauaaauuauauaa |
| | | cgagaauuuaugaaguccauuguauuaaugcagacagucagaugagauaaggcaaagu |
| | | gucacgugucagcuugguaguugcaucggccacaucauuugguucugccuggauaacu |
| | | caaccaaauuaauuuuucauacucauccccuccaccuuugucauuacugguauucuua |
| | | uuuucuuuggcccacuuaucacacuguuuuauguuccccagaaggccuagaguucuuu |
| | | acaggcuuuaaacagggaucagaaguauaagaaauuggcucauguauuuuuuuuucag |
| | | acaggcaguuaaaaaaaauuguucuaaaaauacacuggcaucaaauggcaaauagaag |
| | | auguuuugacgacuacuuccauuggaucagacugacaagaauaauacaagcacauagg |
| | | uggaauuaaacuuagcuauuaauguccaaguuugaggcagcugccccuuauaagcauu |
| | | uuagggucuguuuuuagcuucccucuuagccacuccugugcagcuccagugggaggua |
| | | uggaggaaaaagcaaggaagccaucccuauguuguuuccaaacaugaacacucaagau |
| | | uuuuaacuagugguccagaaguaaagagggggaaaacauccuucuauagaaaaaaaaa |
| | | aaaguagauaauaauugaacacagaacuucaugugaucacaucagauuugagaacuau |
| | | guauggcaucccucuuuuucuuauuuuccuaagaaaugauuucuauuauguuucauuu |
| | | gaaauaaguuuuuugaauuaaacucaguaaaugaaacaacugacaugacuggagcuug |
| | | aaauaaacgaugugaugaucuaaugaaauacauaaugcaaauugucuugcuucuuaug |
| | | caaaaauuauuagucauagcaaugcaugaauaauuaaagacaauuuauauuagguauu |
| | | uaauaauauuuuuuauauuuaucaucugaauuuuuaaguuauuuuaaaaauauauugg |
| | | ucaaaucaacucagguccaaauguuuuaguuuuguucuuuaauauauugccuuuuuaa |
| | | aaugaguuaaacuucuguauaggcuuuuuaacuuuucuuuauucugauaacacaauuc |
| | | ugacuucaucuggcagcaaguuccucugauuuuccuuuuccuuuaaccuuuuaaugcu |
| | | ucucccucccuuuuuuuuaaaaacauuuuuguuucauuuucuugguuauauugccuau |
| | | aguuguuuuccuaaguguauugcuuaagaaaaaaaaauugaauuuuaagauuuuuuug |
| | | aaccuugcuuuuacauauccuagaauaaauagcauugauagaaaaaaagaauggaaag |
| | | accagagauuacuaggggaauuuuuuuucuuuauuaacagauaagaauucugacuuuu |
| | | cuuuuuuuccauuuguguauuag |
| SEQ ID | Exon 21 pre- | GUGGUUGUGAAUGCCCUUUUAGGAGCAAUUCCAUCCAUCAUGAAUGUGCUUCUGGUUU |
| NO: 9 | mRNA | GUCUUAUAUUCUGGCUAAUUUUCAGCAUCAUGGGCGUAAAUUUGUUUGCUGGCAAAUU |
| | | CUACCACUGUAUUAACACCACAACUGGUGACAGGUUUGACAUCGAAGACGUGAAUAAU |
| | | CAUACUGAUUGCCUAAAACUAAUAGAAAGAAAUGAGACUGCUCGAUGGAAAAAUGUGA |
| | | AAGUAAACUUUGAUAAUGUAGGAUUUGGGUAUCUCUCUUUGCUUCAAGUU |
| SEQ ID | Exon 20x pre- | gauaaucuugcuccaacuuggaugggguggaggugguuccccccugagcccuuuauua |
| NO: 10 | mRNA | ugg |
| SEQ ID | Exon 21 pre- | GUUUCAUUGGUCAGUUUAACAGCAAAUGCCUUGGGUUACUCUGAACUCGGGGCCAUCA |
| NO: 17 | mRNA | AAUCCCUAAGGACACUAAGAGCUCUGAGACCCCUAAGAGCCUUAUCACGAUUUGAAGG |
| | | GAUGAGG |
| SEQ ID | Intron 21 pre- | guaagaaaaaggaaaacucugcagcguuguauauugucaaagcuaggcugaguucaac |
| NO: 18 | mRNA | uuaacuaacgaaaaacacgugcaugcaaaaggaauggcaacccuuugcaaacuugcua |
| | | cuuuacccuuuucucuguugcauauuuacuucuuggugauaugcaagagaaaaucggc |
| | | cucuuugaaaaugauuuaauaucauuuaucugcuuugcuaauuaaaaugaccuuaguu |
| | | cauaaucgaucuugggaguuuccuuauaauuccuaauacaaagggggaggggcagaua |
| | | cucucuuaaagaacuaaguugagucauguaauaauuaccuagagauaauuuuguuuca |
| | | uaucguucuccucuaugacagcccaucaguacuuaagggauccuauggaaaguaaugu |
| | | gaaucacaaauguguaugaauacaaaggaaaaaaugaagaauuguuaaauguuuuugu |
| | | cuuuacaaugccaaaauucucauuauuugaauauauccaagggcagauauuaaccauu |
| | | gacuggaguauaauaauacugccucaacuguaacuaaauuaaugacauugaauaagua |
| | | agacacuaauuuaauuacuauaaauacauacacaucuuaugacaauacagcugauaag |
| | | gaaaaagaacauguauuuuuauucauugccauacauggcucgucaaccuuaacuuaaa |
| | | ccucgguucucaguuacacagaguuuuauguugcucuuuugagcaaagcauuauuccc |
| | | cucuccauaauucaacacguaucagauuuuugcauuuauuggcucauuguuaugauga |
| | | uuauuucaaagcauuauacaaucauuuauagaagaugugccgugugaaaguuauuuuu |
| | | uuauuaagauccaaaauuuacgcucuuuaaaccaaucagaugaaauguauaaggcaaa |
| | | gagugcucauuguccugacacuuacaaaccaaggcuccaacaaacaggcuccucucug |
| | | caccacauagagcgcuuucagccuguguccccccauaaaaaccuauuauaaauuuuau |
| | | uauacuauacuguaagaaaccuguccaauuuuuaauuucucuagcacauaugaaaacu |
| | | ucucuucaguagauccaaguaagcacaaaggagcuuugauucucacacaagaaaucac |
| | | auuuguauuaaaaauguaucauaaauuuucucccaauuaugcaaaacuuaaaugcuuu |
| | | uccaauuaaaagagcacuuucguuucagaauagcaauuucaguugucaaggaaaacau |
| | | uguuuuuauacauuuuauauaaaaauacaugagcuaaauuuaaauucacauuuuucaa |
| | | cuuuuuaugguuuuuuuauguuucuuuuucuuucgcauuuuuuaacaauccagccauu |
| | | accucuccucccugucccccuccuauaguuucucaucucauuccuccucccccuugcc |
| | | ucugagaggaugcucccucccucacuaggccucccucuuccccagpggcuucaaguuc |
| | | cucaaggauuauacacaucuucucccacugagaccaggccaggcaguccucugcuucu |
| | | gcccagccuguguauguuccugcuugguagcucagucucuggaagcucccugpcgguc |
| | | ugcguuaguugggacugcuggucuuccuauggaguuacccuccccuucaacuucuuca |
| | | auccuuccccuaauucaaccacagguauccagacuucaguccaaugguugaguguaaa |
| | | uauuggcaucugucucugucagcuguuguuaggggcucagaggacagccaugcuaggc |
| | | uccugccuacaagcagcacaccauaacaucaguaauagugucaggccuuuaaugaaua |
| | | augcuacguauauaagguuguuagauuauacuucaacuuuugaucuuuuagaauauua |
| | | uuaaauccagucguuuauuuuuuauauguaauauugacuuucccauaacaaaugaguc |
| | | uauuuuccuuuuguguagaaauaacuuuaucaauuauuuguuaauaaugcuuuuguca |
| | | auuauuguugauaugcuucucuuuuuuaaaacuggagucaucaaaacaaaaauucugg |
| | | guagauauuacgaagcugacuccuuggucagcuuggcacauagugagaccacaaauau |
| | | cucaaggucacggcaauuccucaccaccaguuuggcauugugaagucaaaaccaaccu |
| | | ucuguugauucugguuuuuguauuucuaguaugagacauuuucuacuuuguaagagua |
| | | uauaacuguggauggcggcgagguugggcaugaugaugauuguaagccpggaagugag |
| | | cuagaguaucuucagaaacucucacuuuauccuccuuggcagcauagaaccgcaaucg |
| | | cugugucccgagugucaaccaggcagucauuuuuguuuuggguuuuuugucacucuuu |
| | | caaagcaugugcuucuacgcaacacuaccaaacacagcaugcugcauagugcuugaga |
| | | aggaguuagaaaguaacaaacgaguuaucaucacguugcccuuuguguuuugcauguc |
| | | uuaugcacacuuuuggcugacagcuuuugaacauuuauuguauuucaaauuuccaguc |
| | | caaauuuuuuuuucaacuugugaaauugaacggaaugaaccgaugucgugaauaccua |
| | | gggucaaauaaaacuuguauuuaaauucguaguuuuaauuucccaagcugggaaaauc |
| | | guaaaaaccuuuuccaaagaacucaagucuuaguugcuagggaaacaggcagugagca |
| | | ucauauacaaaaaguaacaccaaauguuucugucauaucagcuuucuaacuaauaaua |
| | | aacuauauauuucuauuuuauauaggauaaucuugcuccaacuuggaugcgguggagc |
| | | ggugguuccuccccucagccccuuuauuauggguacuguauuaccccuuuugcuaccu |
| | | uuaauccuugcacugugacuuauguguagugggauugagcgagggagugcgaagcgua |
| | | caauugcaccacaguagggacaauacaggauuuauuuccaaauccacuacuuuuaaug |
| | | agcuuaaacuucuuuugggaaaaaaaaaguuaucucugacuuaccaucuguggauuau |
| | | aaccccagaaguacauaucuuuauuuacguuucacugaauaugauuuagcuauuuaua |
| | | cuucauuguccauuuauggggaaauuacucaauuggugagggugggcgaccccuggug |
| | | uaggaugcugaugaaaacguuuucauuugucaagcucaugguagugacagagcauaua |
| | | guccuuauuuuuucaacacacugcucuggucccucaaugggccagucacauuccauca |
| | | guugaucguugaugugugccgagcagugpcuaaagguacaacaggccagguaucucag |
| | | gguugccaaugguuaugaucauucucaucuuuauugcauaaaaauguguuauuugcag |
| | | aaaguagcaaggcaagaucccugugaaacaagggaauacaaaaaaaaaaaaagaugug |
| | | cuuuaaguuauaaaaccaaaacaugugaaaagucaacuucauugaaguauaaagaaua |
| | | ggauaugcaugaaaaacaaaaaaaucaugagcacuaagaaauugguguauaagcccaa |
| | | cuccuuguaagcuaccccaauuaacuucccagaaucuuagaaggcaucacagugcacc |
| | | ccaaaauaaaaagccaaacugacacuucugcuuccucuuaaaauguaggagucuugga |
| | | uaagaaagauaauuuuuauuuguuuggaagaaaaaaaaauuguuuggauaauugaggc |
| | | auuuaucuaucaaaaauauuuuaucuuaauaaaauuucacaacacugauuuaguuguu |
| | | ggcuuuucuaaaaauuuuuuauauuucauauuaagaacucaugauuuuuacuuuccau |
| | | uuuuuaaauucuuauucacauaugguuuuucucuauuucuuagaaaagcuauagaacc |
| | | caugguuuccggugacuuaaaaaacuaaucuaaaugucuucacuuagaugauacuuuc |
| | | aaaugcacugaaauuucuaauaucaacaagaauauuugccugguccuaauuuuucacu |
| | | gauuuaauaaaaaguaugaacccuaaagaagaaauagacuugaagaacugguugugug |
| | | acaauacagaaauucugccugggagauguccuuuuaaaacauuguuagaagagacaac |
| | | cucuacaauccacccauuaagcauacuucucucuuagacaucuccuuuuauguaccuu |
| | | auaaccucaauguguucuuuccaauugacuuagaccaacacuucccagcgcaucccac |
| | | augggagccaauuacugacucucccuagagacugcaaagaauuaauauuguagaacca |
| | | agggaugguugggcucuugpgagaggcaauccguuugugaucuuuugcucuggauguu |
| | | aaugaaaucgcaacuuuaaguggauuuucaguggcaaauccucugauccuaugccaaa |
| | | uguucucuaagacaaacauccuuguaaaauaaaugucucacugcgccaaaucuauggc |
| | | aaauuugcacguuuuuccugaacugcauuccuauauaguauuugccauccugaauuca |
| | | cuaaugggcauuacuuuuaguucaaaaccagucccuucuucaaaggaaaucucuccca |
| | | uuuauuacauuaugcaaacugcuuucuuaugcagugguuaaauccuuagccaggcaag |
| | | uaugaggacuggaauuuggauauccagaacccucagaaaugucggaugcgcauaguag |
| | | cuuacauguaauuccagagcuagaaagaugaaacuagcccuguccucaagcucugaau |
| | | ucaguuggugcaauaaauaagaaagaauccccccccccgaccccuacaucucuuuccu |
| | | cuacaucuauacauguauuucccauacagcucuaugcuuccacauauaugcucacaua |
| | | ugugcaugcacacuugcacacauauguacacuugacacauugaagcaucauaaucuaa |
| | | caauuggaauauaagaaaauauuuaacuuucacacagagcagucagagaaaaccauaa |
| | | gagguugaaacucuugaaaaaacuugcaggauaaacagaaaagaguaugagaugccaa |
| | | uucuggucuacuuuucugaaccuaacuuguuuuaccuucauuagucuaauuuuccaaa |
| | | ugaaccccaagcaccaaauuguccuuauugcucuuuccaguacuaaauuauaauuccu |
| | | caauucgaaggcaaacacucucaucuuuguuaaggauguguagaguuagacucaauaa |
| | | acgacauguauauuugagcuaaagccuggaggagggagauuauuucaagggcaaguac |
| | | uuggcagggaguuucaaagaaagaaggcucucaauucucagacuaacaccuuagcgug |
| | | gagugacugucacagaggagcgugaaguguaugucaccaguuagcgaagcugaaaggg |
| | | gaaauguaucaggcuugugagaauccuucagcagccaagucuagcaccugagcacaau |
| | | ccccagaacugaccccacaugguggaaaggagaggaauaauuccugcaaauuuuccug |
| | | ugaccuccacccaagugcuauagaaaaugcaugcaugccccacaugcacacacaaaua |
| | | aacauaguugcaaacuguuuugaggaaaauaaccucacaaacugucgagugauguaaa |
| | | ugccaaagaaagagaaauguuuucuaauggcuagagaaccauuaaggaauuuuucaaa |
| | | augggacaugpgauagauaaauuuaguauccauacugaaagaaggcaagcaaauaaaa |
| | | ucugauaagaauguaauucuuaguaaccgaggacagagcgaagauagagaacagggcc |
| | | aauggccaagguggaaagguuugaaggaagcagcaugaaaccuacagacuuguaccaa |
| | | aauguucagugucaugaguguuaaaagugaaaagcuugcauguuaguauggauuucau |
| | | auccucggcagacagagcaccucacugugagugcgagaugaaguauucagaaaugaga |
| | | aacaacuacucaauuucaguguucauaucucaaauccaauaaacaacuuuagggguac |
| | | aauuuuuuuaaaaaauuacauuaaaauguuuuuaaaucucuucuuaauaauuuaaaaa |
| | | uuaaauugaaaauaacuuuaaaaaguaauauauacaggaaagccugugugcuaauuuu |
| | | uuagcgaggccauaaagcgagauaguugcucauuaauuucuacacaucagccuaucuu |
| | | uggcuucugccuugauagcgcacucugaauuaucuucuucauguucaucccucaucuu |
| | | uauuguuacugguuucauuucccuuggccacauagccccacuauuuuguauuccccaa |
| | | uggauauuguuccuuacaaaguucagccagcgcucagaaguacaaggaauuggcucuu |
| | | auacuucugucagacaggcaaaaacuucuaaaauuauacuauaauaaaaaucaaagag |
| | | augauauucauaauuaaacuaacaaaaguggcaggcccccccucccccaacaugagua |
| | | gaauuaaucugacguccauguucaagucugaaacacacuugccaauuaagagcacauu |
| | | agggccagccuuuaucucccucuuaguuacuaaugugcaguucaauggugagcuauag |
| | | agaaggaagccaagacuaccauaugucaaauauaaaaaaaaaaaaucccauuuuaaau |
| | | cuguagucccgaauuaaggacaagagagagggaaauaucuuugacauuagaaaaugga |
| | | gaaaauauuuuagcacaggacuuuacucagucacaucagaguugauaaguacguauga |
| | | caucccucuuuuuccuguuuuccugagaaaaugaucucucuaguguuucauuuaagau |
| | | aaguuuauugaauuaaacucaguaaaugaaacaacugacaugacuggagcuugaaaua |
| | | aacgaugugaugaucuacugaaauacaugaugcuaaauugucuugcuucuuaugcaaa |
| | | aacuacuauuaguuauagcaaugcauggauaauuaaggccaaaaauauauuagauguu |
| | | aaaaauaguuuuauauuuauacaucugaauuuuaauuuauauuuaaaguauauugguc |
| | | caaucaauucaugcccaaauguuuuaguucuauucuuugagauacuguuuuuguuuug |
| | | ggauuuuuuuuuaugagcuaaucucuugccuaggaguuccuacuucucucuccuccuu |
| | | uuauuuuuucuaauaaacuacacaugugucuucauccaggagcuaacuuucucccauu |
| | | uugcuuuuccuuuagcaccuuuuuuauauuagauuucuuucuuuucuccaucucuuug |
| | | cauauugccuauauuucuuuuccuaagcauaauauuuaaaaaagacuugaguuuuaug |
| | | uuaagauuauuucugcuuugcucuuacacagauaggauaaguagucuugauagaaaau |
| | | aaaucaaugauuccuagcgggaugucuuuuugcuuuuaaucaauaaggauucugacuu |
| | | cucuuucucuccauuuguguauuag |
| SEQ ID | Exon 22 pre- | GUGGUUGUGAAUGCCCUGUUAGGAGCAAUUCCAUCCAUCAUGAAUGUGCUUCUGGUUU |
| NO: 19 | mRNA | GCCUUAUAUUCUGGCUAAUUUUCAGCAUCAUGGGCGUAAAUUUGUUUGCUGGCAAAUU |
| | | CUACCACUGUGUUAACACCACAACUGGUGACAUAUUUGAGAUCAGCGAAGUCAAUAAU |
| | | CAUUCUGAUUGCCUAAAACUAAUAGAAAGAAAUGAGACCGCCCGGUGGAAAAAUGUGA |
| | | AAGUAAACUUUGAUAAUGUAGGAUUUGGGUAUCUUUCUUUGCUUCAAGUU |
| SEQ ID | Exon 21x pre- | gauaaucuugcuccaacuuggaugggguggagggugguuccccccucagcccuuuauu |
| NO: 20 | mRNA | augg |

### Example 14: SCN1A Exon 20x Region ASO Walk

[0564] An ASO walk was performed for SCN1A exon 20x region targeting sequences immediately upstream of 3′ splice site, across 3′splice site, exon 20x, across 5′ splice site, and downstream of 5′ splice site using 2′-MOE ASOs, PS backbone. ASOs were designed to cover these regions by shifting 5 nucleotides at a time. A list of ASOs targeting SCN1A is summarized in Table 3. Sequences of ASOs are summarized in Table 4A and Table 4B and Table 5A and Table 5B.

TABLE 3
List of ASOs targeting SCNIA.

| Gene | Pre-mRNA | ASOs | |
|---|---|---|---|
| SEQ ID NO: | SEQ ID NO: | SEQ ID NO: | NIE |
| SEQ ID NO: 1 | SEQ ID NO: 2 | SEQ ID NOS: | Exon 20x |
| | | 21-67, 210-256, 304-1099 | |
| SEQ ID NO: 11 | SEQ ID NO: 12 | SEQ ID NOs: | Exon 21x |
| | | 68-114, 257-303 | |

TABLE 4A
Sequences of ASOs targeting human SCN1A.

| SEQ ID NO: | Sequence name | ASO sequence |
|---|---|---|
| 21 | SCN1A-IVS19X−81 | GATGCTCTCCGTCTGTTT |
| 22 | SCN1A-IVS19X−76 | TTCATGATGCTCTCCGTC |
| 23 | SCN1A-IVS19X−71 | TTTTGTTCATGATGCTCT |
| 24 | SCN1A-IVS19X−66 | TTACTTTTTGTTCATGAT |
| 25 | SCN1A-IVS19X−61 | TGGTGTTACTTTTTGTTC |
| 26 | SCN1A-IVS19X−56 | ACATTTGGTGTTACTTTT |
| 27 | SCN1A-IVS19X−51 | ACAGAACATTTGGTGTTA |
| 28 | SCN1A-IVS19X−46 | ATATGACAGAACATTTGG |
| 29 | SCN1A-IVS19X−41 | ATCTGATATGACAGAACA |
| 30 | SCN1A-IVS19X−36 | TAGAAATCTGATATGACA |
| 31 | SCN1A-IVS19X−31 | TTAGTTAGAAATCTGATA |
| 32 | SCN1A-IVS19X−26 | TGTTATTAGTTAGAAATC |
| 33 | SCN1A-IVS19X−21 | TAGTTTGTTATTAGTTAG |
| 34 | SCN1A-IVS19X−16 | ATATATAGTTTGTTATTA |
| 35 | SCN1A-IVS19X−11 | TAGAAATATATAGTTTGT |
| 36 | SCN1A-IVS19X−6 | CAAAATAGAAATATATAG |
| 37 | SCN1A-IVS19X−3 | ATACAAAATAGAAATATA |
| 38 | SCN1A-IVS19X−1 | CTATACAAAATAGAAATA |
| 39 | SCN1A-I19X/E20X+2 | TCCTATACAAAATAGAAA |
| 40 | SCN1A-I19X/E20X+4 | TATCCTATACAAAATAGA |
| 41 | SCN1A-I19X/E20X+6 | ATTATCCTATACAAAATA |
| 42 | SCN1A-Ex20X+1 | AGTTGGAGCAAGATTATC |
| 43 | SCN1A-Ex20X+6 | ATCCAAGTTGGAGCAAGA |
| 44 | SCN1A-Ex20X+11 | ACCCCATCCAAGTTGGAG |
| 45 | SCN1A-Ex20X+16 | GCTCCACCCCATCCAAGT |
| 46 | SCN1A-Ex20X+21 | CCAGCGCTCCACCCCATC |
| 47 | SCN1A-Ex20X−24 | GAACCAGCGCTCCACCCC |
| 48 | SCN1A-Ex20X−19 | GGGAGGAACCAGCGCTCC |
| 49 | SCN1A-Ex20X−3 | ATAATAAAGGGCTCAGGG |
| 50 | SCN1A-Ex20X−1 | CCATAATAAAGGGCTCAG |
| 51 | SCN1A-E20X/I20X−6 | GTAATACAGTACCCATAA |
| 52 | SCN1A-E20X/I20X−4 | GGGTAATACAGTACCCAT |
| 53 | SCN1A-IVS20X+13 | TTAAAGGTAGCAAAAGGG |
| 54 | SCN1A-IVS20X+18 | AAGGATTAAAGGTAGCAA |
| 55 | SCN1A-IVS20X+23 | AGTGCAAGGATTAAAGGT |
| 56 | SCN1A-IVS20X+28 | GTCACAGTGCAAGGATTA |
| 57 | SCN1A-IVS20X+33 | CATAAGTCACAGTGCAAG |
| 58 | SCN1A-IVS20X+38 | CTACACATAAGTCACAGT |
| 59 | SCN1A-IVS20X+43 | CCCCACTACACATAAGTC |
| 60 | SCN1A-IVS20X+48 | CCTCACCCCACTACACAT |
| 61 | SCN1A-IVS20X+53 | CCCTCCCTCACCCCACTA |
| 62 | SCN1A-IVS20X+58 | CCAATCCCTCCCTCACCC |
| 63 | SCN1A-IVS20X+63 | CCTTCCCAATCCCTCCCT |
| 64 | SCN1A-IVS20X+68 | AGTACCCTTCCCAATCCC |
| 65 | SCN1A-IVS20X+73 | ATAATAGTACCCTTCCCA |
| 66 | SCN1A-IVS20X+78 | GTGCAATAATAGTACCCT |
| 67 | SCN1A-IVS20X+83 | CTGTGGTGCAATAATAGT |

TABLE 4B
Sequences of ASOs targeting human SCN1A.

| SEQ ID NO: | Sequence name | ASO sequence |
|---|---|---|
| 210 | SCN1A-IVS19X−81 | GAUGCUCUCCGUCUGUUU |
| 211 | SCN1A-IVS19X−76 | UUCAUGAUGCUCUCCGUC |
| 212 | SCN1A-IVS19X−71 | UUUUGUUCAUGAUGCUCU |
| 213 | SCN1A-IVS19X−66 | UUACUUUUUGUUCAUGAU |
| 214 | SCN1A-IVS19X−61 | UGGUGUUACUUUUUGUUC |
| 215 | SCN1A-IVS19X−56 | ACAUUUGGUGUUACUUUU |
| 216 | SCN1A-IVS19X−51 | ACAGAACAUUUGGUGUUA |
| 217 | SCN1A-IVS19X−46 | AUAUGACAGAACAUUUGG |
| 218 | SCN1A-IVS19X−41 | AUCUGAUAUGACAGAACA |
| 219 | SCN1A-IVS19X−36 | UAGAAAUCUGAUAUGACA |
| 220 | SCN1A-IVS19X−31 | UUAGUUAGAAAUCUGAUA |
| 221 | SCN1A-IVS19X−26 | UGUUAUUAGUUAGAAAUC |
| 222 | SCN1A-IVS19X−21 | UAGUUUGUUAUUAGUUAG |
| 223 | SCN1A-IVS19X−16 | AUAUAUAGUUUGUUAUUA |
| 224 | SCN1A-IVS19X−11 | UAGAAAUAUAUAGUUUGU |
| 225 | SCN1A-IVS19X−6 | CAAAAUAGAAAUAUAUAG |
| 226 | SCN1A-IVS19X−3 | AUACAAAAUAGAAAUAUA |
| 227 | SCN1A-IVS19X−1 | CUAUACAAAAUAGAAAUA |
| 228 | SCN1A-I19X/E20X+2 | UCCUAUACAAAAUAGAAA |
| 229 | SCN1A-I19X/E20X+4 | UAUCCUAUACAAAAUAGA |
| 230 | SCN1A-I19X/E20X+6 | AUUAUCCUAUACAAAAUA |
| 231 | SCN1A-Ex20X+1 | AGUUGGAGCAAGAUUAUC |
| 232 | SCN1A-Ex20X+6 | AUCCAAGUUGGAGCAAGA |
| 233 | SCN1A-Ex20X+11 | ACCCCAUCCAAGUUGGAG |
| 234 | SCN1A-Ex20X+16 | GCUCCACCCCAUCCAAGU |
| 235 | SCN1A-Ex20X+21 | CCAGCGCUCCACCCCAUC |
| 236 | SCN1A-Ex20X−24 | GAACCAGCGCUCCACCCC |
| 237 | SCN1A-Ex20X−19 | GGGAGGAACCAGCGCUCC |
| 238 | SCN1A-Ex20X−3 | AUAAUAAAGGGCUCAGGG |
| 239 | SCN1A-Ex20X−1 | CCAUAAUAAAGGGCUCAG |
| 240 | SCN1A-E20X/120X−6 | GUAAUACAGUACCCAUAA |
| 241 | SCN1A-E20X/120X−4 | GGGUAAUACAGUACCCAU |
| 242 | SCN1A-IVS20X+13 | UUAAAGGUAGCAAAAGGG |
| 243 | SCN1A-IVS20X+18 | AAGGAUUAAAGGUAGCAA |
| 244 | SCN1A-IVS20X+23 | AGUGCAAGGAUUAAAGGU |
| 245 | SCN1A-IVS20X+28 | GUCACAGUGCAAGGAUUA |
| 246 | SCN1A-IVS20X+33 | CAUAAGUCACAGUGCAAG |
| 247 | SCN1A-IVS20X+38 | CUACACAUAAGUCACAGU |
| 248 | SCN1A-IVS20X+43 | CCCCACUACACAUAAGUC |
| 249 | SCN1A-IVS20X+48 | CCUCACCCCACUACACAU |
| 250 | SCN1A-IVS20X+53 | CCCUCCCUCACCCCACUA |
| 251 | SCN1A-IVS20X+58 | CCAAUCCCUCCCUCACCC |
| 252 | SCN1A-IVS20X+63 | CCUUCCCAAUCCCUCCCU |
| 253 | SCN1A-IVS20X+68 | AGUACCCUUCCCAAUCCC |
| 254 | SCN1A-IVS20X+73 | AUAAUAGUACCCUUCCCA |
| 255 | SCN1A-IVS20X+78 | GUGCAAUAAUAGUACCCU |
| 256 | SCN1A-IVS20X+83 | CUGUGGUGCAAUAAUAGU |

TABLE 5A
Sequences of ASOs targeting mouse SCN1A.

| SEQ | | |
|---|---|---|
| ID NO: | Sequence name | ASO sequence |
| 68 | mScn1a-IVS20X − 81 | GATGCTCACTGCCTGTTT |
| 69 | mScn1a-IVS20X − 76 | TATATGATGCTCACTGCC |
| 70 | mScn1a-IVS20X − 71 | TTTTGTATATGATGCTCA |
| 71 | mScn1a-IVS20X − 66 | TTACTTTTTGTATATGAT |
| 72 | mScn1a-IVS20X − 61 | TGGTGTTACTTTTTGTAT |
| 73 | mScn1a-IVS20X − 56 | ACATTTGGTGTTACTTTT |
| 74 | mScn1a-IVS20X − 51 | ACAGAACATTTGGTGTTA |
| 75 | mScn1a-IVS20X − 46 | ATATGACAGAACATTTGG |
| 76 | mScn1a-IVS20X − 41 | AGCTGATATGACAGAACA |
| 77 | mScn1a-IVS20X − 36 | TAGAAAGCTGATATGACA |
| 78 | mScn1a-IVS20X − 31 | TTAGTTAGAAAGCTGATA |
| 79 | mScn1a-IVS20X − 26 | TATTATTAGTTAGAAAGC |
| 80 | mScn1a-IVS20X − 21 | TAGTTTATTATTAGTTAG |
| 81 | mScn1a-IVS20X − 16 | ATATATAGTTTATTATTA |
| 82 | mScn1a-IVS20X − 11 | TAGAAATATATAGTTTAT |
| 83 | mScn1a-IVS20X − 6 | TAAAATAGAAATATATAG |
| 84 | mScn1a-IVS20X − 3 | ATATAAAATAGAAATATA |
| 85 | mScn1a-IVS20X − 1 | CTATATAAAATAGAAATA |
| 86 | mScn1a-I20X/E21X + 2 | TCCTATATAAAATAGAAA |
| 87 | mScn1a-I20X/E21X + 4 | TATCCTATATAAAATAGA |
| 88 | mScn1a-I20X/E21X + 6 | ATTATCCTATATAAAATA |
| 89 | mScn1a-Ex21X + 1 | AGTTGGAGCAAGATTATC |
| 90 | mScn1a-Ex21X + 6 | ATCCAAGTTGGAGCAAGA |
| 91 | mScn1a-Ex21X + 11 | ACCCCATCCAAGTTGGAG |
| 92 | mScn1a-Ex21X + 16 | GCTCCACCCCATCCAAGT |
| 93 | mScn1a-Ex21X + 21 | CCACCGCTCCACCCCATC |
| 94 | mScn1a-Ex21X − 24 | GAACCACCGCTCCACCCC |
| 95 | mScn1a-Ex21X − 19 | GGGAGGAACCACCGCTCC |
| 96 | mScn1a-Ex21X − 3 | ATAATAAAGGGCTGAGGG |
| 97 | mScn1a-Ex21X − 1 | CCATAATAAAGGGCTGAG |
| 98 | mScn1a-E21X/I21X − 6 | GTAATACAGTACCCATAA |
| 99 | mScn1a-E21X/I21X − 4 | GGGTAATACAGTACCCAT |
| 100 | mScn1a-IVS21X + 13 | TTAAAGGTAGCAAAAGGG |
| 101 | mScn1a-IVS21X + 18 | AAGGATTAAAGGTAGCAA |
| 102 | mScn1a-IVS21X + 23 | AGTGCAAGGATTAAAGGT |
| 103 | mScn1a-IVS21X + 28 | GTCACAGTGCAAGGATTA |
| 104 | mScn1a-IVS21X + 33 | CATAAGTCACAGTGCAAG |
| 105 | mScn1a-IVS21X + 38 | CTACACATAAGTCACAGT |
| 106 | mScn1a-IVS21X + 43 | TCCCACTACACATAAGTC |
| 107 | mScn1a-IVS21X + 48 | CTCAATCCCACTACACAT |
| 108 | mScn1a-IVS21X + 53 | CCTCCCTCAATCCCACTA |
| 109 | mScn1a-IVS21X + 58 | CACTCCCTCCCTCAATCC |
| 110 | mScn1a-IVS21X + 63 | CTTCCCACTCCCTCCCTC |
| 111 | mScn1a-IVS21X + 68 | GTACCCTTCCCACTCCCT |
| 112 | mScn1a-IVS21X + 73 | CAATTGTACCCTTCCCAC |
| 113 | mScn1a-IVS21X + 78 | TGGTGCAATTGTACCCTT |
| 114 | mScn1a-IVS21X + 83 | TACTGTGGTGCAATTGTA |

TABLE 5B
Sequences of ASOs targeting mouse SCN1A.

| SEQ | | |
|---|---|---|
| ID NO: | Sequence name | ASO sequence |
| 257 | mScn1a-IVS20X − 81 | GAUGCUCACUGCCUGUUU |
| 258 | mScn1a-IVS20X − 76 | UAUAUGAUGCUCACUGCC |
| 259 | mScn1a-IVS20X − 71 | UUUUGUAUAUGAUGCUCA |
| 260 | mScn1a-IVS20X − 66 | UUACUUUUUGUAUAUGAU |
| 261 | mScn1a-IVS20X − 61 | UGGUGUUACUUUUUGUAU |
| 262 | mScn1a-IVS20X − 56 | ACAUUUGGUGUUACUUUU |
| 263 | mScn1a-IVS20X − 51 | ACAGAACAUUUGGUGUUA |
| 264 | mScn1a-IVS20X − 46 | AUAUGACAGAACAUUUGG |
| 265 | mScn1a-IVS20X − 41 | AGCUGAUAUGACAGAACA |
| 266 | mScn1a-IVS20X − 36 | UAGAAAGCUGAUAUGACA |
| 267 | mScn1a-IVS20X − 31 | UUAGUUAGAAAGCUGAUA |
| 268 | mScn1a-IVS20X − 26 | UAUUAUUAGUUAGAAAGC |
| 269 | mScn1a-IVS20X − 21 | UAGUUUAUUAUUAGUUAG |
| 270 | mScn1a-IVS20X − 16 | AUAUAUAGUUUAUUAUUA |
| 271 | mScn1a-IVS20X − 11 | UAGAAAUAUAUAGUUUAU |
| 272 | mScn1a-IVS20X − 6 | UAAAAUAGAAAUAUAUAG |
| 273 | mScn1a-IVS20X − 3 | AUAUAAAAUAGAAAUAUA |
| 274 | mScn1a-IVS20X − 1 | CUAUAUAAAAUAGAAAUA |
| 275 | mScn1a-I20X/E21X + 2 | UCCUAUAUAAAAUAGAAA |
| 276 | mScn1a-I20X/E21X + 4 | UAUCCUAUAUAAAAUAGA |
| 277 | mScn1a-I20X/E21X + 6 | AUUAUCCUAUAUAAAAUA |
| 278 | mScn1a-Ex21X + 1 | AGUUGGAGCAAGAUUAUC |
| 279 | mScn1a-Ex21X + 6 | AUCCAAGUUGGAGCAAGA |
| 280 | mScn1a-Ex21X + 11 | ACCCCAUCCAAGUUGGAG |
| 281 | mScn1a-Ex21X + 16 | GCUCCACCCCAUCCAAGU |
| 282 | mScn1a-Ex21X + 21 | CCACCGCUCCACCCCAUC |
| 283 | mScn1a-Ex21X − 24 | GAACCACCGCUCCACCCC |
| 284 | mScn1a-Ex21X − 19 | GGGAGGAACCACCGCUCC |
| 285 | mScn1a-Ex21X − 3 | AUAAUAAAGGGCUGAGGG |
| 286 | mScn1a-Ex21X − 1 | CCAUAAUAAAGGGCUGAG |
| 287 | mScn1a-E21X/121X − 6 | GUAAUACAGUACCCAUAA |
| 288 | mScn1a-E21X/121X − 4 | GGGUAAUACAGUACCCAU |
| 289 | mScn1a-IVS21X + 13 | UUAAAGGUAGCAAAAGGG |
| 290 | mScn1a-IVS21X + 18 | AAGGAUUAAAGGUAGCAA |
| 291 | mScn1a-IVS21X + 23 | AGUGCAAGGAUUAAAGGU |
| 292 | mScn1a-IVS21X + 28 | GUCACAGUGCAAGGAUUA |
| 293 | mScn1a-IVS21X + 33 | CAUAAGUCACAGUGCAAG |
| 294 | mScn1a-IVS21X + 38 | CUACACAUAAGUCACAGU |
| 295 | mScn1a-IVS21X + 43 | UCCCACUACACAUAAGUC |
| 296 | mScn1a-IVS21X + 48 | CUCAAUCCCACUACACAU |
| 297 | mScn1a-IVS21X + 53 | CCUCCCUCAAUCCCACUA |
| 298 | mScn1a-IVS21X + 58 | CACUCCCUCCCUCAAUCC |
| 299 | mScn1a-IVS21X + 63 | CUUCCCACUCCCUCCCUC |
| 300 | mScn1a-IVS21X + 68 | GUACCCUUCCCACUCCCU |
| 301 | mScn1a-IVS21X + 73 | CAAUUGUACCCUUCCCAC |
| 302 | mScn1a-IVS21X + 78 | UGGUGCAAUUGUACCCUU |
| 303 | mScn1a-IVS21X + 83 | UACUGUGGUGCAAUUGUA |

[0565] Sequences of ASOs are summarized in Table 6A and Table 6B.

TABLE 6A
Sequences of ASOs targeting human SCN1A.

| ASO ID | Sequence 5′-3′ | SEQ ID NO: |
|---|---|---|
| 1 | TTGGAGCAAGATTATC | 304 |
| 2 | GTTGGAGCAAGATTATC | 305 |
| 3 | GTTGGAGCAAGATTAT | 306 |
| 4 | AGTTGGAGCAAGATTAT | 307 |
| 5 | AGTTGGAGCAAGATTA | 308 |
| 6 | GATTATCCTATACAAAAT | 309 |
| 7 | AGATTATCCTATACAAAA | 310 |
| 8 | AAGATTATCCTATACAAA | 311 |
| 9 | CAAGATTATCCTATACAA | 312 |
| 10 | GCAAGATTATCCTATACA | 313 |
| 11 | AGCAAGATTATCCTATAC | 314 |
| 12 | GAGCAAGATTATCCTATA | 315 |
| 13 | GGAGCAAGATTATCCTAT | 316 |
| 14 | TGGAGCAAGATTATCCTA | 317 |
| 15 | GTTGGAGCAAGATTATCC | 318 |
| 16 | TTGGAGCAAGATTATCCT | 319 |
| 18 | AAGTTGGAGCAAGATTAT | 320 |
| 19 | CAAGTTGGAGCAAGATTA | 321 |
| 20 | CCAAGTTGGAGCAAGATT | 322 |
| 21 | TCCAAGTTGGAGCAAGAT | 323 |
| 22 | AGTACCCATAATAAAGGG | 324 |
| 23 | AATACAGTACCCATAATA | 325 |
| 24 | ATTAAAGGTAGCAAAAGG | 326 |
| 25 | GATTAAAGGTAGCAAAAG | 327 |
| 26 | GGATTAAAGGTAGCAAAA | 328 |
| 27 | AGGATTAAAGGTAGCAAA | 329 |
| 29 | CAAGGATTAAAGGTAGCA | 330 |
| 30 | GCAAGGATTAAAGGTAGC | 331 |
| 31 | TGCAAGGATTAAAGGTAG | 332 |
| 32 | GTGCAAGGATTAAAGGTA | 333 |
| 33 | AGTCACAGTGCAAGGATT | 334 |
| 34 | AAGTCACAGTGCAAGGAT | 335 |
| 35 | TAAGTCACAGTGCAAGGA | 336 |
| 36 | ATAAGTCACAGTGCAAGG | 337 |
| 38 | ACATAAGTCACAGTGCAA | 338 |
| 39 | CACATAAGTCACAGTGCA | 339 |
| 40 | ACACATAAGTCACAGTGC | 340 |
| 41 | TACACATAAGTCACAGTG | 341 |

TABLE 6B
Sequences of ASOs targeting human SCN1A.

| ASO ID | Sequence 5′-3′ | SEQ ID NO: |
|---|---|---|
| 1_U | UUGGAGCAAGAUUAUC | 342 |
| 2_U | GUUGGAGCAAGAUUAUC | 343 |
| 3_U | GUUGGAGCAAGAUUAU | 344 |
| 4_U | AGUUGGAGCAAGAUUAU | 345 |
| 5_U | AGUUGGAGCAAGAUUA | 346 |
| 6_U | GAUUAUCCUAUACAAAAU | 347 |
| 7_U | AGAUUAUCCUAUACAAAA | 348 |
| 8_U | AAGAUUAUCCUAUACAAA | 349 |
| 9_U | CAAGAUUAUCCUAUACAA | 350 |
| 10_U | GCAAGAUUAUCCUAUACA | 351 |
| 11_U | AGCAAGAUUAUCCUAUAC | 352 |
| 12_U | GAGCAAGAUUAUCCUAUA | 353 |
| 13_U | GGAGCAAGAUUAUCCUAU | 354 |
| 14_U | UGGAGCAAGAUUAUCCUA | 355 |
| 15_U | GUUGGAGCAAGAUUAUCC | 356 |
| 16_U | UUGGAGCAAGAUUAUCCU | 357 |
| 18_U | AAGUUGGAGCAAGAUUAU | 358 |
| 19_U | CAAGUUGGAGCAAGAUUA | 359 |
| 20_U | CCAAGUUGGAGCAAGAUU | 360 |
| 21_U | UCCAAGUUGGAGCAAGAU | 361 |
| 22_U | AGUACCCAUAAUAAAGGG | 362 |
| 23_U | AAUACAGUACCCAUAAUA | 363 |
| 24_U | AUUAAAGGUAGCAAAAGG | 364 |
| 25_U | GAUUAAAGGUAGCAAAAG | 365 |
| 26_U | GGAUUAAAGGUAGCAAAA | 366 |
| 27_U | AGGAUUAAAGGUAGCAAA | 367 |
| 29_U | CAAGGAUUAAAGGUAGCA | 368 |
| 30_U | GCAAGGAUUAAAGGUAGC | 369 |
| 31_U | UGCAAGGAUUAAAGGUAG | 370 |
| 32_U | GUGCAAGGAUUAAAGGUA | 371 |
| 33_U | AGUCACAGUGCAAGGAUU | 372 |
| 34_U | AAGUCACAGUGCAAGGAU | 373 |
| 35_U | UAAGUCACAGUGCAAGGA | 374 |
| 36_U | AUAAGUCACAGUGCAAGG | 375 |
| 38_U | ACAUAAGUCACAGUGCAA | 376 |
| 39_U | CACAUAAGUCACAGUGCA | 377 |
| 40_U | ACACAUAAGUCACAGUGC | 378 |
| 41_U | UACACAUAAGUCACAGUG | 379 |

[0566] Sequences of ASOs are summarized in Table 7.

TABLE 7
Sequences of ASOs targeting human SCN1A.

| Sequence | Chr2 | Chr2 | SEQ | | SEQ | |
|---|---|---|---|---|---|---|
| Name | Start | End | ID NO: | ASO sequence | ID NO: | ASO sequence |
| SCN1A- | 16686 | 16686 | 380 | ATGAATTTAATA | 740 | AUGAAUUUAA |
| IVS22-986 | 4788 | 4806 | | AACTTT | | UAAACUUU |
| SCN1A- | 16686 | 16686 | 381 | GACCAATGAAT | 741 | GACCAAUGAAU |
| IVS22-981 | 4783 | 4801 | | TTAATAA | | UUAAUAA |
| SCN1A- | 16686 | 16686 | 382 | CACTTGACCAA | 742 | CACUUGACCAA |
| IVS22-976 | 4778 | 4796 | | TGAATTT | | UGAAUUU |
| SCN1A- | 16686 | 16686 | 383 | CTGAGCACTTG | 743 | CUGAGCACUUG |
| IVS22-971 | 4773 | 4791 | | ACCAATG | | ACCAAUG |
| SCN1A- | 16686 | 16686 | 384 | AATATCTGAGC | 744 | AAUAUCUGAGC |
| IVS22-966 | 4768 | 4786 | | ACTTGAC | | ACUUGAC |
| SCN1A- | 16686 | 16686 | 385 | ATGGAAATATC | 745 | AUGGAAAUAU |
| IVS22-961 | 4763 | 4781 | | TGAGCAC | | CUGAGCAC |
| SCN1A- | 16686 | 16686 | 386 | AATGTATGGAA | 746 | AAUGUAUGGA |
| IVS22-956 | 4758 | 4776 | | ATATCTG | | AAUAUCUG |
| SCN1A- | 16686 | 16686 | 387 | AGTGTAATGTA | 747 | AGUGUAAUGU |
| IVS22-951 | 4753 | 4771 | | TGGAAAT | | AUGGAAAU |
| SCN1A- | 16686 | 16686 | 388 | AATGAAGTGTA | 748 | AAUGAAGUGU |
| IVS22-946 | 4748 | 4766 | | ATGTATG | | AAUGUAUG |
| SCN1A- | 16686 | 16686 | 389 | ATAGAAATGAA | 749 | AUAGAAAUGA |
| IVS22-941 | 4743 | 4761 | | GTGTAAT | | AGUGUAAU |
| SCN1A- | 16686 | 16686 | 390 | TTTTTATAGAA | 750 | UUUUUAUAGA |
| IVS22-936 | 4738 | 4756 | | ATGAAGT | | AAUGAAGU |
| SCN1A- | 16686 | 16686 | 391 | CAGCTTTTTTAT | 751 | CAGCUUUUUUA |
| IVS22-931 | 4733 | 4751 | | AGAAAT | | UAGAAAU |
| SCN1A- | 16686 | 16686 | 392 | AAGATCAGCTT | 752 | AAGAUCAGCUU |
| IVS22-926 | 4728 | 4746 | | TTTTATA | | UUUUAUA |
| SCN1A- | 16686 | 16686 | 393 | CCGATAAGATC | 753 | CCGAUAAGAUC |
| IVS22-921 | 4723 | 4741 | | AGCTTTT | | AGCUUUU |
| SCN1A- | 16686 | 16686 | 394 | GTATACCGATA | 754 | GUAUACCGAUA |
| IVS22-916 | 4718 | 4736 | | AGATCAG | | AGAUCAG |
| SCN1A- | 16686 | 16686 | 395 | TAAAAGTATAC | 755 | UAAAAGUAUA |
| IVS22-911 | 4713 | 4731 | | CGATAAG | | CCGAUAAG |
| SCN1A- | 16686 | 16686 | 396 | AAAATTAAAAG | 756 | AAAAUUAAAA |
| IVS22-906 | 4708 | 4726 | | TATACCG | | GUAUACCG |
| SCN1A- | 16686 | 16686 | 397 | CTGAGAAAATT | 757 | CUGAGAAAAU |
| IVS22-901 | 4703 | 4721 | | AAAAGTA | | UAAAAGUA |
| SCN1A- | 16686 | 16686 | 398 | TATTTCTGAGA | 758 | UAUUUCUGAG |
| IVS22-896 | 4698 | 4716 | | AAATTAA | | AAAAUUAA |
| SCN1A- | 16686 | 16686 | 399 | ATGGTTATTTCT | 759 | AUGGUUAUUU |
| IVS22-891 | 4693 | 4711 | | GAGAAA | | CUGAGAAA |
| SCN1A- | 16686 | 16686 | 400 | TAGATATGGTTA | 760 | UAGAUAUGGU |
| IVS22-886 | 4688 | 4706 | | TTTCTG | | UAUUUCUG |
| SCN1A- | 16686 | 16686 | 401 | AATTATAGATAT | 761 | AAUUAUAGAU |
| IVS22-881 | 4683 | 4701 | | GGTTAT | | AUGGUUAU |
| SCN1A- | 16686 | 16686 | 402 | TTAATAATTATA | 762 | UUAAUAAUUA |
| IVS22-876 | 4678 | 4696 | | GATATG | | UAGAUAUG |
| SCN1A- | 16686 | 16686 | 403 | ATTGATTAATAA | 763 | AUUGAUUAAU |
| IVS22-871 | 4673 | 4691 | | TTATAG | | AAUUAUAG |
| SCN1A- | 16686 | 16686 | 404 | GCATTATTGATT | 764 | GCAUUAUUGA |
| IVS22-866 | 4668 | 4686 | | AATAAT | | UUAAUAAU |
| SCN1A- | 16686 | 16686 | 405 | AAAAGGCATTA | 765 | AAAAGGCAUU |
| IVS22-861 | 4663 | 4681 | | TTGATTA | | AUUGAUUA |
| SCN1A- | 16686 | 16686 | 406 | AATATAAAAGG | 766 | AAUAUAAAAG |
| IVS22-856 | 4658 | 4676 | | CATTATT | | GCAUUAUU |
| SCN1A- | 16686 | 16686 | 407 | CTTTTAATATAA | 767 | CUUUUAAUAU |
| IVS22-851 | 4653 | 4671 | | AAGGCA | | AAAAGGCA |
| SCN1A- | 16686 | 16686 | 408 | AACCTCTTTTA | 768 | AACCUCUUUUA |
| IVS22-846 | 4648 | 4666 | | ATATAAA | | AUAUAAA |
| SCN1A- | 16686 | 16686 | 409 | AAACTAACCTC | 769 | AAACUAACCUC |
| IVS22-841 | 4643 | 4661 | | TTTTAAT | | UUUUAAU |
| SCN1A- | 16686 | 16686 | 410 | TTCAAAAACTA | 770 | UUCAAAAACUA |
| IVS22-836 | 4638 | 4656 | | ACCTCTT | | ACCUCUU |
| SCN1A- | 16686 | 16686 | 411 | CAAGTTTCAAA | 771 | CAAGUUUCAAA |
| IVS22-831 | 4633 | 4651 | | AACTAAC | | AACUAAC |
| SCN1A- | 16686 | 16686 | 412 | AACTCCAAGTT | 772 | AACUCCAAGUU |
| IVS22-826 | 4628 | 4646 | | TCAAAAA | | UCAAAAA |
| SCN1A- | 16686 | 16686 | 413 | TCTAAAACTCC | 773 | UCUAAAACUCC |
| IVS22-821 | 4623 | 4641 | | AAGTTTC | | AAGUUUC |
| SCN1A- | 16686 | 16686 | 414 | TTATGTCTAAA | 774 | UUAUGUCUAA |
| IVS22-816 | 4618 | 4636 | | ACTCCAA | | AACUCCAA |
| SCN1A- | 16686 | 16686 | 415 | GGATTTTATGTC | 775 | GGAUUUUAUG |
| IVS22-811 | 4613 | 4631 | | TAAAAC | | UCUAAAAC |
| SCN1A- | 16686 | 16686 | 416 | TATAAGGATTTT | 776 | UAUAAGGAUU |
| IVS22-806 | 4608 | 4626 | | ATGTCT | | UUAUGUCU |
| SCN1A- | 16686 | 16686 | 417 | GCATTTATAAG | 777 | GCAUUUAUAA |
| IVS22-801 | 4603 | 4621 | | GATTTTA | | GGAUUUUA |
| SCN1A- | 16686 | 16686 | 418 | TATCAGCATTTA | 778 | UAUCAGCAUUU |
| IVS22-796 | 4598 | 4616 | | TAAGGA | | AUAAGGA |
| SCN1A- | 16686 | 16686 | 419 | ATCACTATCAG | 779 | AUCACUAUCAG |
| IVS22-791 | 4593 | 4611 | | CATTTAT | | CAUUUAU |
| SCN1A- | 16686 | 16686 | 420 | GTTATATCACTA | 780 | GUUAUAUCACU |
| IVS22-786 | 4588 | 4606 | | TCAGCA | | AUCAGCA |
| SCN1A- | 16686 | 16686 | 421 | TATTAGTTATAT | 781 | UAUUAGUUAU |
| IVS22-781 | 4583 | 4601 | | CACTAT | | AUCACUAU |
| SCN1A- | 16686 | 16686 | 422 | TAAACTATTAG | 782 | UAAACUAUUA |
| IVS22-776 | 4578 | 4596 | | TTATATC | | GUUAUAUC |
| SCN1A- | 16686 | 16686 | 423 | CCATTTAAACT | 783 | CCAUUUAAACU |
| IVS22-771 | 4573 | 4591 | | ATTAGTT | | AUUAGUU |
| SCN1A- | 16686 | 16686 | 424 | TCTGACCATTT | 784 | UCUGACCAUUU |
| IVS22-766 | 4568 | 4586 | | AAACTAT | | AAACUAU |
| SCN1A- | 16686 | 16686 | 425 | ATAAATCTGAC | 785 | AUAAAUCUGAC |
| IVS22-761 | 4563 | 4581 | | CATTTAA | | CAUUUAA |
| SCN1A- | 16686 | 16686 | 426 | TATTCATAAATC | 786 | UAUUCAUAAA |
| IVS22-756 | 4558 | 4576 | | TGACCA | | UCUGACCA |
| SCN1A- | 16686 | 16686 | 427 | AGCCATATTCAT | 787 | AGCCAUAUUCA |
| IVS22-751 | 4553 | 4571 | | AAATCT | | UAAAUCU |
| SCN1A- | 16686 | 16686 | 428 | AATAGAGCCAT | 788 | AAUAGAGCCAU |
| IVS22-746 | 4548 | 4566 | | ATTCATA | | AUUCAUA |
| SCN1A- | 16686 | 16686 | 429 | TGAGGAATAGA | 789 | UGAGGAAUAG |
| IVS22-741 | 4543 | 4561 | | GCCATAT | | AGCCAUAU |
| SCN1A- | 16686 | 16686 | 430 | CATTATGAGGA | 790 | CAUUAUGAGG |
| IVS22-736 | 4538 | 4556 | | ATAGAGC | | AAUAGAGC |
| SCN1A- | 16686 | 16686 | 431 | GTTGTCATTATG | 791 | GUUGUCAUUA |
| IVS22-731 | 4533 | 4551 | | AGGAAT | | UGAGGAAU |
| SCN1A- | 16686 | 16686 | 432 | TGTATGTTGTC | 792 | UGUAUGUUGU |
| IVS22-726 | 4528 | 4546 | | ATTATGA | | CAUUAUGA |
| SCN1A- | 16686 | 16686 | 433 | CTGTGTGTATG | 793 | CUGUGUGUAU |
| IVS22-721 | 4523 | 4541 | | TTGTCAT | | GUUGUCAU |
| SCN1A- | 16686 | 16686 | 434 | TAGTGCTGTGT | 794 | UAGUGCUGUG |
| IVS22-716 | 4518 | 4536 | | GTATGTT | | UGUAUGUU |
| SCN1A- | 16686 | 16686 | 435 | CATTTTAGTGC | 795 | CAUUUUAGUGC |
| IVS22-711 | 4513 | 4531 | | TGTGTGT | | UGUGUGU |
| SCN1A- | 16686 | 16686 | 436 | TTAGTCATTTTA | 796 | UUAGUCAUUU |
| IVS22-706 | 4508 | 4526 | | GTGCTG | | UAGUGCUG |
| SCN1A- | 16686 | 16686 | 437 | AGAGATTAGTC | 797 | AGAGAUUAGU |
| IVS22-701 | 4503 | 4521 | | ATTTTAG | | CAUUUUAG |
| SCN1A- | 16686 | 16686 | 438 | ATTGAAGAGAT | 798 | AUUGAAGAGA |
| IVS22-696 | 4498 | 4516 | | TAGTCAT | | UUAGUCAU |
| SCN1A- | 16686 | 16686 | 439 | CACGTATTGAA | 799 | CACGUAUUGAA |
| IVS22-691 | 4493 | 4511 | | GAGATTA | | GAGAUUA |
| SCN1A- | 16686 | 16686 | 440 | CCAAACACGTA | 800 | CCAAACACGUA |
| IVS22-686 | 4488 | 4506 | | TTGAAGA | | UUGAAGA |
| SCN1A- | 16686 | 16686 | 441 | CAATGCCAAAC | 801 | CAAUGCCAAAC |
| IVS22-681 | 4483 | 4501 | | ACGTATT | | ACGUAUU |
| SCN1A- | 16686 | 16686 | 442 | CTCTACAATGC | 802 | CUCUACAAUGC |
| IVS22-676 | 4478 | 4496 | | CAAACAC | | CAAACAC |
| SCN1A- | 16686 | 16686 | 443 | TTTGACTCTAC | 803 | UUUGACUCUAC |
| IVS22-671 | 4473 | 4491 | | AATGCCA | | AAUGCCA |
| SCN1A- | 16686 | 16686 | 444 | GTTATTTTGACT | 804 | GUUAUUUUGA |
| IVS22-666 | 4468 | 4486 | | CTACAA | | CUCUACAA |
| SCN1A- | 16686 | 16686 | 445 | ATAACGTTATTT | 805 | AUAACGUUAU |
| IVS22-661 | 4463 | 4481 | | TGACTC | | UUUGACUC |
| SCN1A- | 16686 | 16686 | 446 | CAATTATAACG | 806 | CAAUUAUAACG |
| IVS22-656 | 4458 | 4476 | | TTATTTT | | UUAUUUU |
| SCN1A- | 16686 | 16686 | 447 | AGAATCAATTA | 807 | AGAAUCAAUU |
| IVS22-651 | 4453 | 4471 | | TAACGTT | | AUAACGUU |
| SCN1A- | 16686 | 16686 | 448 | AAAATAGAATC | 808 | AAAAUAGAAU |
| IVS22-646 | 4448 | 4466 | | AATTATA | | CAAUUAUA |
| SCN1A- | 16686 | 16686 | 449 | TATAAAAAATA | 809 | UAUAAAAAAU |
| IVS22-641 | 4443 | 4461 | | GAATCAA | | AGAAUCAA |
| SCN1A- | 16686 | 16686 | 450 | AGAAGTATAAA | 810 | AGAAGUAUAA |
| IVS22-636 | 4438 | 4456 | | AAATAGA | | AAAAUAGA |
| SCN1A- | 16686 | 16686 | 451 | ACACTAGAAGT | 811 | ACACUAGAAGU |
| IVS22-631 | 4433 | 4451 | | ATAAAAA | | AUAAAAA |
| SCN1A- | 16686 | 16686 | 452 | TCCAAACACTA | 812 | UCCAAACACUA |
| IVS22-626 | 4428 | 4446 | | GAAGTAT | | GAAGUAU |
| SCN1A- | 16686 | 16686 | 453 | AAATATCCAAA | 813 | AAAUAUCCAAA |
| IVS22-621 | 4423 | 4441 | | CACTAGA | | CACUAGA |
| SCN1A- | 16686 | 16686 | 454 | AAATAAAATAT | 814 | AAAUAAAAUA |
| IVS22-616 | 4418 | 4436 | | CCAAACA | | UCCAAACA |
| SCN1A- | 16686 | 16686 | 455 | TTACAAAATAA | 815 | UUACAAAAUA |
| IVS22-611 | 4413 | 4431 | | AATATCC | | AAAUAUCC |
| SCN1A- | 16686 | 16686 | 456 | TATTTTTACAAA | 816 | UAUUUUUACA |
| IVS22-606 | 4408 | 4426 | | ATAAAA | | AAAUAAAA |
| SCN1A- | 16686 | 16686 | 457 | GATTATATTTTT | 817 | GAUUAUAUUU |
| IVS22-601 | 4403 | 4421 | | ACAAAA | | UUACAAAA |
| SCN1A- | 16686 | 16686 | 458 | TTCATGATTATA | 818 | UUCAUGAUUA |
| IVS22-596 | 4398 | 4416 | | TTTTTA | | UAUUUUUA |
| SCN1A- | 16686 | 16686 | 459 | CATCATTCATG | 819 | CAUCAUUCAUG |
| IVS22-591 | 4393 | 4411 | | ATTATAT | | AUUAUAU |
| SCN1A- | 16686 | 16686 | 460 | CTCACCATCAT | 820 | CUCACCAUCAU |
| IVS22-586 | 4388 | 4406 | | TCATGAT | | UCAUGAU |
| SCN1A- | 16686 | 16686 | 461 | CCAACCTCACC | 821 | CCAACCUCACC |
| IVS22-581 | 4383 | 4401 | | ATCATTC | | AUCAUUC |
| SCN1A- | 16686 | 16686 | 462 | TATATCCAACCT | 822 | UAUAUCCAACC |
| IVS22-576 | 4378 | 4396 | | CACCAT | | UCACCAU |
| SCN1A- | 16686 | 16686 | 463 | ATTCTTATATCC | 823 | AUUCUUAUAUC |
| IVS22-571 | 4373 | 4391 | | AACCTC | | CAACCUC |
| SCN1A- | 16686 | 16686 | 464 | TCATCATTCTTA | 824 | UCAUCAUUCUU |
| IVS22-566 | 4368 | 4386 | | TATCCA | | AUAUCCA |
| SCN1A- | 16686 | 16686 | 465 | CATAATCATCAT | 825 | CAUAAUCAUCA |
| IVS22-561 | 4363 | 4381 | | TCTTAT | | UUCUUAU |
| SCN1A- | 16686 | 16686 | 466 | CCAATCATAAT | 826 | CCAAUCAUAAU |
| IVS22-556 | 4358 | 4376 | | CATCATT | | CAUCAUU |
| SCN1A- | 16686 | 16686 | 467 | ACTTCCCAATC | 827 | ACUUCCCAAUC |
| IVS22-551 | 4353 | 4371 | | ATAATCA | | AUAAUCA |
| SCN1A- | 16686 | 16686 | 468 | ATCTCACTTCC | 828 | AUCUCACUUCC |
| IVS22-546 | 4348 | 4366 | | CAATCAT | | CAAUCAU |
| SCN1A- | 16686 | 16686 | 469 | TTCAAATCTCA | 829 | UUCAAAUCUCA |
| IVS22-541 | 4343 | 4361 | | CTTCCCA | | CUUCCCA |
| SCN1A- | 16686 | 16686 | 470 | GCATGTTCAAA | 830 | GCAUGUUCAAA |
| IVS22-536 | 4338 | 4356 | | TCTCACT | | UCUCACU |
| SCN1A- | 16686 | 16686 | 471 | TCTGAGCATGT | 831 | UCUGAGCAUGU |
| IVS22-531 | 4333 | 4351 | | TCAAATC | | UCAAAUC |
| SCN1A- | 16686 | 16686 | 472 | GAGTTTCTGAG | 832 | GAGUUUCUGA |
| IVS22-526 | 4328 | 4346 | | CATGTTC | | GCAUGUUC |
| SCN1A- | 16686 | 16686 | 473 | AATGAGAGTTT | 833 | AAUGAGAGUU |
| IVS22-521 | 4323 | 4341 | | CTGAGCA | | UCUGAGCA |
| SCN1A- | 16686 | 16686 | 474 | AATTAAATGAG | 834 | AAUUAAAUGA |
| IVS22-516 | 4318 | 4336 | | AGTTTCT | | GAGUUUCU |
| SCN1A- | 16686 | 16686 | 475 | CAAAGAATTAA | 835 | CAAAGAAUUA |
| IVS22-511 | 4313 | 4331 | | ATGAGAG | | AAUGAGAG |
| SCN1A- | 16686 | 16686 | 476 | TAGGGCAAAG | 836 | UAGGGCAAAG |
| IVS22-506 | 4308 | 4326 | | AATTAAAT | | AAUUAAAU |
| SCN1A- | 16686 | 16686 | 477 | GCTGCTAGGGC | 837 | GCUGCUAGGGC |
| IVS22-501 | 4303 | 4321 | | AAAGAAT | | AAAGAAU |
| SCN1A- | 16686 | 16686 | 478 | TTTATGCTGCTA | 838 | UUUAUGCUGCU |
| IVS22-496 | 4298 | 4316 | | GGGCAA | | AGGGCAA |
| SCN1A- | 16686 | 16686 | 479 | GTGATTTTATGC | 839 | GUGAUUUUAU |
| IVS22-491 | 4293 | 4311 | | TGCTAG | | GCUGCUAG |
| SCN1A- | 16686 | 16686 | 480 | CTATTGTGATTT | 840 | CUAUUGUGAU |
| IVS22-486 | 4288 | 4306 | | TATGCT | | UUUAUGCU |
| SCN1A- | 16686 | 16686 | 481 | CGCAGCTATTG | 841 | CGCAGCUAUUG |
| IVS22-481 | 4283 | 4301 | | TGATTTT | | UGAUUUU |
| SCN1A- | 16686 | 16686 | 482 | TTTGACGCAGC | 842 | UUUGACGCAGC |
| IVS22-476 | 4278 | 4296 | | TATTGTG | | UAUUGUG |
| SCN1A- | 16686 | 16686 | 483 | TACGCTTTGAC | 843 | UACGCUUUGAC |
| IVS22-471 | 4273 | 4291 | | GCAGCTA | | GCAGCUA |
| SCN1A- | 16686 | 16686 | 484 | TGAGTTACGCT | 844 | UGAGUUACGCU |
| IVS22-466 | 4268 | 4286 | | TTGACGC | | UUGACGC |
| SCN1A- | 16686 | 16686 | 485 | GTGCCTGAGTT | 845 | GUGCCUGAGUU |
| IVS22-461 | 4263 | 4281 | | ACGCTTT | | ACGCUUU |
| SCN1A- | 16686 | 16686 | 486 | AATGAGTGCCT | 846 | AAUGAGUGCCU |
| IVS22-456 | 4258 | 4276 | | GAGTTAC | | GAGUUAC |
| SCN1A- | 16686 | 16686 | 487 | AATAAAATGAG | 847 | AAUAAAAUGA |
| IVS22-451 | 4253 | 4271 | | TGCCTGA | | GUGCCUGA |
| SCN1A- | 16686 | 16686 | 488 | ACAAAAATAAA | 848 | ACAAAAAUAA |
| IVS22-446 | 4248 | 4266 | | ATGAGTG | | AAUGAGUG |
| SCN1A- | 16686 | 16686 | 489 | GAACAACAAA | 849 | GAACAACAAAA |
| IVS22-441 | 4243 | 4261 | | AATAAAAT | | AUAAAAU |
| SCN1A- | 16686 | 16686 | 490 | TAACAGAACAA | 850 | UAACAGAACAA |
| IVS22-436 | 4238 | 4256 | | CAAAAAT | | CAAAAAU |
| SCN1A- | 16686 | 16686 | 491 | AAAAATAACAG | 851 | AAAAAUAACA |
| IVS22-431 | 4233 | 4251 | | AACAACA | | GAACAACA |
| SCN1A- | 16686 | 16686 | 492 | TTTGAAAAAAT | 852 | UUUGAAAAAA |
| IVS22-426 | 4228 | 4246 | | AACAGAA | | UAACAGAA |
| SCN1A- | 16686 | 16686 | 493 | CATGCTTTGAA | 853 | CAUGCUUUGAA |
| IVS22-421 | 4223 | 4241 | | AAAATAA | | AAAAUAA |
| SCN1A- | 16686 | 16686 | 494 | AAGCACATGCT | 854 | AAGCACAUGCU |
| IVS22-416 | 4218 | 4236 | | TTGAAAA | | UUGAAAA |
| SCN1A- | 16686 | 16686 | 495 | CATAAAAGCAC | 855 | CAUAAAAGCAC |
| IVS22-411 | 4213 | 4231 | | ATGCTTT | | AUGCUUU |
| SCN1A- | 16686 | 16686 | 496 | TGTTGCATAAA | 856 | UGUUGCAUAA |
| IVS22-406 | 4208 | 4226 | | AGCACAT | | AAGCACAU |
| SCN1A- | 16686 | 16686 | 497 | AGTAATGTTGC | 857 | AGUAAUGUUG |
| IVS22-401 | 4203 | 4221 | | ATAAAAG | | CAUAAAAG |
| SCN1A- | 16686 | 16686 | 498 | TATTCAGTAATG | 858 | UAUUCAGUAA |
| IVS22-396 | 4198 | 4216 | | TTGCAT | | UGUUGCAU |
| SCN1A- | 16686 | 16686 | 499 | TGCTTTATTCA | 859 | UGCUUUAUUCA |
| IVS22-391 | 4193 | 4211 | | GTAATGT | | GUAAUGU |
| SCN1A- | 16686 | 16686 | 500 | CAACATGCTTT | 860 | CAACAUGCUUU |
| IVS22-386 | 4188 | 4206 | | ATTCAGT | | AUUCAGU |
| SCN1A- | 16686 | 16686 | 501 | CTGTACAACAT | 861 | CUGUACAACAU |
| IVS22-381 | 4183 | 4201 | | GCTTTAT | | GCUUUAU |
| SCN1A- | 16686 | 16686 | 502 | AAGCACTGTAC | 862 | AAGCACUGUAC |
| IVS22-376 | 4178 | 4196 | | AACATGC | | AACAUGC |
| SCN1A- | 16686 | 16686 | 503 | TTATCAAGCAC | 863 | UUAUCAAGCAC |
| IVS22-371 | 4173 | 4191 | | TGTACAA | | UGUACAA |
| SCN1A- | 16686 | 16686 | 504 | ACTTCTTATCA | 864 | ACUUCUUAUCA |
| IVS22-366 | 4168 | 4186 | | AGCACTG | | AGCACUG |
| SCN1A- | 16686 | 16686 | 505 | TTCTAACTTCTT | 865 | UUCUAACUUCU |
| IVS22-361 | 4163 | 4181 | | ATCAAG | | UAUCAAG |
| SCN1A- | 16686 | 16686 | 506 | TTACTTTCTAAC | 866 | UUACUUUCUAA |
| IVS22-356 | 4158 | 4176 | | TTCTTA | | CUUCUUA |
| SCN1A- | 16686 | 16686 | 507 | ATTTGTTACTTT | 867 | AUUUGUUACU |
| IVS22-351 | 4153 | 4171 | | CTAACT | | UUCUAACU |
| SCN1A- | 16686 | 16686 | 508 | AATTTATTTGTT | 868 | AAUUUAUUUG |
| IVS22-346 | 4148 | 4166 | | ACTTTC | | UUACUUUC |
| SCN1A- | 16686 | 16686 | 509 | ATGATAATTTAT | 869 | AUGAUAAUUU |
| IVS22-341 | 4143 | 4161 | | TTGTTA | | AUUUGUUA |
| SCN1A- | 16686 | 16686 | 510 | ACGTGATGATA | 870 | ACGUGAUGAU |
| IVS22-336 | 4138 | 4156 | | ATTTATT | | AAUUUAUU |
| SCN1A- | 16686 | 16686 | 511 | GTGCAACGTGA | 871 | GUGCAACGUGA |
| IVS22-331 | 4133 | 4151 | | TGATAAT | | UGAUAAU |
| SCN1A- | 16686 | 16686 | 512 | ACAAAGTGCA | 872 | ACAAAGUGCAA |
| IVS22-326 | 4128 | 4146 | | ACGTGATG | | CGUGAUG |
| SCN1A- | 16686 | 16686 | 513 | AAAACACAAA | 873 | AAAACACAAAG |
| IVS22-321 | 4123 | 4141 | | GTGCAACG | | UGCAACG |
| SCN1A- | 16686 | 16686 | 514 | CATGCAAAACA | 874 | CAUGCAAAACA |
| IVS22-316 | 4118 | 4136 | | CAAAGTG | | CAAAGUG |
| SCN1A- | 16686 | 16686 | 515 | TAAAACATGCA | 875 | UAAAACAUGCA |
| IVS22-311 | 4113 | 4131 | | AAACACA | | AAACACA |
| SCN1A- | 16686 | 16686 | 516 | GTGCATAAAAC | 876 | GUGCAUAAAAC |
| IVS22-306 | 4108 | 4126 | | ATGCAAA | | AUGCAAA |
| SCN1A- | 16686 | 16686 | 517 | GAAATGTGCAT | 877 | GAAAUGUGCA |
| IVS22-301 | 4103 | 4121 | | AAAACAT | | UAAAACAU |
| SCN1A- | 16686 | 16686 | 518 | AGCCAGAAATG | 878 | AGCCAGAAAUG |
| IVS22-296 | 4098 | 4116 | | TGCATAA | | UGCAUAA |
| SCN1A- | 16686 | 16686 | 519 | CTGTCAGCCAG | 879 | CUGUCAGCCAG |
| IVS22-291 | 4093 | 4111 | | AAATGTG | | AAAUGUG |
| SCN1A- | 16686 | 16686 | 520 | AAAAGCTGTCA | 880 | AAAAGCUGUCA |
| IVS22-286 | 4088 | 4106 | | GCCAGAA | | GCCAGAA |
| SCN1A- | 16686 | 16686 | 521 | TGTTTAAAAGC | 881 | UGUUUAAAAG |
| IVS22-281 | 4083 | 4101 | | TGTCAGC | | CUGUCAGC |
| SCN1A- | 16686 | 16686 | 522 | ATAAATGTTTA | 882 | AUAAAUGUUU |
| IVS22-276 | 4078 | 4096 | | AAAGCTG | | AAAAGCUG |
| SCN1A- | 16686 | 16686 | 523 | ATACAATAAAT | 883 | AUACAAUAAA |
| IVS22-271 | 4073 | 4091 | | GTTTAAA | | UGUUUAAA |
| SCN1A- | 16686 | 16686 | 524 | TTGAAATACAA | 884 | UUGAAAUACA |
| IVS22-266 | 4068 | 4086 | | TAAATGT | | AUAAAUGU |
| SCN1A- | 16686 | 16686 | 525 | GAAATTTGAAA | 885 | GAAAUUUGAA |
| IVS22-261 | 4063 | 4081 | | TACAATA | | AUACAAUA |
| SCN1A- | 16686 | 16686 | 526 | GACTGGAAATT | 886 | GACUGGAAAU |
| IVS22-256 | 4058 | 4076 | | TGAAATA | | UUGAAAUA |
| SCN1A- | 16686 | 16686 | 527 | ATTTGGACTGG | 887 | AUUUGGACUG |
| IVS22-251 | 4053 | 4071 | | AAATTTG | | GAAAUUUG |
| SCN1A- | 16686 | 16686 | 528 | GAAAAATTTGG | 888 | GAAAAAUUUG |
| IVS22-246 | 4048 | 4066 | | ACTGGAA | | GACUGGAA |
| SCN1A- | 16686 | 16686 | 529 | AAGTTGAAAA | 889 | AAGUUGAAAA |
| IVS22-241 | 4043 | 4061 | | ATTTGGAC | | AUUUGGAC |
| SCN1A- | 16686 | 16686 | 530 | TTTACAAGTTG | 890 | UUUACAAGUU |
| IVS22-236 | 4038 | 4056 | | AAAAATT | | GAAAAAUU |
| SCN1A- | 16686 | 16686 | 531 | TTAATTTTACAA | 891 | UUAAUUUUAC |
| IVS22-231 | 4033 | 4051 | | GTTGAA | | AAGUUGAA |
| SCN1A- | 16686 | 16686 | 532 | TCAGTTTAATTT | 892 | UCAGUUUAAU |
| IVS22-226 | 4028 | 4046 | | TACAAG | | UUUACAAG |
| SCN1A- | 16686 | 16686 | 533 | TTCACTCAGTT | 893 | UUCACUCAGUU |
| IVS22-221 | 4023 | 4041 | | TAATTTT | | UAAUUUU |
| SCN1A- | 16686 | 16686 | 534 | ATCAATTCACT | 894 | AUCAAUUCACU |
| IVS22-216 | 4018 | 4036 | | CAGTTTA | | CAGUUUA |
| SCN1A- | 16686 | 16686 | 535 | ACGACATCAAT | 895 | ACGACAUCAAU |
| IVS22-211 | 4013 | 4031 | | TCACTCA | | UCACUCA |
| SCN1A- | 16686 | 16686 | 536 | TATTCACGACA | 896 | UAUUCACGACA |
| IVS22-206 | 4008 | 4026 | | TCAATTC | | UCAAUUC |
| SCN1A- | 16686 | 16686 | 537 | CTAGATATTCAC | 897 | CUAGAUAUUCA |
| IVS22-201 | 4003 | 4021 | | GACATC | | CGACAUC |
| SCN1A- | 16686 | 16686 | 538 | TTACCCTAGAT | 898 | UUACCCUAGAU |
| IVS22-196 | 3998 | 4016 | | ATTCACG | | AUUCACG |
| SCN1A- | 16686 | 16686 | 539 | TTATTTTACCCT | 899 | UUAUUUUACCC |
| IVS22-191 | 3993 | 4011 | | AGATAT | | UAGAUAU |
| SCN1A- | 16686 | 16686 | 540 | AAATTTTATTTT | 900 | AAAUUUUAUU |
| IVS22-186 | 3988 | 4006 | | ACCCTA | | UUACCCUA |
| SCN1A- | 16686 | 16686 | 541 | AACACAAATTT | 901 | AACACAAAUUU |
| IVS22-181 | 3983 | 4001 | | TATTTTA | | UAUUUUA |
| SCN1A- | 16686 | 16686 | 542 | ATTTAAACACA | 902 | AUUUAAACACA |
| IVS22-176 | 3978 | 3996 | | AATTTTA | | AAUUUUA |
| SCN1A- | 16686 | 16686 | 543 | TACAAATTTAA | 903 | UACAAAUUUA |
| IVS22-171 | 3973 | 3991 | | ACACAAA | | AACACAAA |
| SCN1A- | 16686 | 16686 | 544 | AAAAATACAAA | 904 | AAAAAUACAA |
| IVS22-166 | 3968 | 3986 | | TTTAAAC | | AUUUAAAC |
| SCN1A- | 16686 | 16686 | 545 | AAATTAAAAAT | 905 | AAAUUAAAAA |
| IVS22-161 | 3963 | 3981 | | ACAAATT | | UACAAAUU |
| SCN1A- | 16686 | 16686 | 546 | TTAGGAAATTA | 906 | UUAGGAAAUU |
| IVS22-156 | 3958 | 3976 | | AAAATAC | | AAAAAUAC |
| SCN1A- | 16686 | 16686 | 547 | CTAGGTTAGGA | 907 | CUAGGUUAGG |
| IVS22-151 | 3953 | 3971 | | AATTAAA | | AAAUUAAA |
| SCN1A- | 16686 | 16686 | 548 | ATTTCCTAGGT | 908 | AUUUCCUAGGU |
| IVS22-146 | 3948 | 3966 | | TAGGAAA | | UAGGAAA |
| SCN1A- | 16686 | 16686 | 549 | TTAAGATTTCC | 909 | UUAAGAUUUCC |
| IVS22-141 | 3943 | 3961 | | TAGGTTA | | UAGGUUA |
| SCN1A- | 16686 | 16686 | 550 | GGTATTTAAGA | 910 | GGUAUUUAAG |
| IVS22-136 | 3938 | 3956 | | TTTCCTA | | AUUUCCUA |
| SCN1A- | 16686 | 16686 | 551 | AAGAAGGTATT | 911 | AAGAAGGUAU |
| IVS22-131 | 3933 | 3951 | | TAAGATT | | UUAAGAUU |
| SCN1A- | 16686 | 16686 | 552 | TGAAAAAGAA | 912 | UGAAAAAGAA |
| IVS22-126 | 3928 | 3946 | | GGTATTTA | | GGUAUUUA |
| SCN1A- | 16686 | 16686 | 553 | TCTTTTGAAAA | 913 | UCUUUUGAAA |
| IVS22-121 | 3923 | 3941 | | AGAAGGT | | AAGAAGGU |
| SCN1A- | 16686 | 16686 | 554 | TGAGTTCTTTT | 914 | UGAGUUCUUU |
| IVS22-116 | 3918 | 3936 | | GAAAAAG | | UGAAAAAG |
| SCN1A- | 16686 | 16686 | 555 | AGACTTGAGTT | 915 | AGACUUGAGU |
| IVS22-111 | 3913 | 3931 | | CTTTTGA | | UCUUUUGA |
| SCN1A- | 16686 | 16686 | 556 | CATTAAGACTT | 916 | CAUUAAGACUU |
| IVS22-106 | 3908 | 3926 | | GAGTTCT | | GAGUUCU |
| SCN1A- | 16686 | 16686 | 557 | CTATCCATTAAG | 917 | CUAUCCAUUAA |
| IVS22-101 | 3903 | 3921 | | ACTTGA | | GACUUGA |
| SCN1A- | 16686 | 16686 | 558 | TTTCCCTATCCA | 918 | UUUCCCUAUCC |
| IVS22-096 | 3898 | 3916 | | TTAAGA | | AUUAAGA |
| SCN1A- | 16686 | 16686 | 559 | GTCTGTTTCCC | 919 | GUCUGUUUCCC |
| IVS22-091 | 3893 | 3911 | | TATCCAT | | UAUCCAU |
| SCN1A- | 16686 | 16686 | 560 | TTTCCCTACTG | 920 | UUUCCCUACUG |
| IVS23 + 091 | 3631 | 3649 | | TGGTGCA | | UGGUGCA |
| SCN1A- | 16686 | 16686 | 561 | TGTATTTTCCCT | 921 | UGUAUUUUCCC |
| IVS23 + 096 | 3626 | 3644 | | ACTGTG | | UACUGUG |
| SCN1A- | 16686 | 16686 | 562 | AATAATGTATTT | 922 | AAUAAUGUAU |
| IVS23 + 101 | 3621 | 3639 | | TCCCTA | | UUUCCCUA |
| SCN1A- | 16686 | 16686 | 563 | ATGTAAATAAT | 923 | AUGUAAAUAA |
| IVS23 + 106 | 3616 | 3634 | | GTATTTT | | UGUAUUUU |
| SCN1A- | 16686 | 16686 | 564 | TTAGGATGTAA | 924 | UUAGGAUGUA |
| IVS23 + 111 | 3611 | 3629 | | ATAATGT | | AAUAAUGU |
| SCN1A- | 16686 | 16686 | 565 | AGGGATTAGGA | 925 | AGGGAUUAGG |
| IVS23 + 116 | 3606 | 3624 | | TGTAAAT | | AUGUAAAU |
| SCN1A- | 16686 | 16686 | 566 | AAAGAGGGAA | 926 | AAAGAGGGAA |
| IVS23 + 121 | 3601 | 3619 | | TTAGGATG | | UUAGGAUG |
| SCN1A- | 16686 | 16686 | 567 | ATTGAAAAGAA | 927 | AUUGAAAAGA |
| IVS23 + 126 | 3596 | 3614 | | GGGATTA | | AGGGAUUA |
| SCN1A- | 16686 | 16686 | 568 | AGACAATTGAA | 928 | AGACAAUUGA |
| IVS23 + 131 | 3591 | 3609 | | AAGAGGG | | AAAGAGGG |
| SCN1A- | 16686 | 16686 | 569 | ATTTAAGACAA | 929 | AUUUAAGACA |
| IVS23 + 136 | 3586 | 3604 | | TTGAAAA | | AUUGAAAA |
| SCN1A- | 16686 | 16686 | 570 | ATGAAATTTAA | 930 | AUGAAAUUUA |
| IVS23 + 141 | 3581 | 3599 | | GACAATT | | AGACAAUU |
| SCN1A- | 16686 | 16686 | 571 | TTCAAATGAAA | 931 | UUCAAAUGAA |
| IVS23 + 146 | 3576 | 3594 | | TTTAAGA | | AUUUAAGA |
| SCN1A- | 16686 | 16686 | 572 | TTTTTTTCAAAT | 932 | UUUUUUUCAA |
| IVS23 + 151 | 3571 | 3589 | | GAAATT | | AUGAAAUU |
| SCN1A- | 16686 | 16686 | 573 | TTTTTTTTTTTT | 933 | UUUUUUUUUU |
| IVS23 + 156 | 3566 | 3584 | | CAAATG | | UUCAAAUG |
| SCN1A- | 16686 | 16686 | 574 | AAGGTTTTTTT | 934 | AAGGUUUUUU |
| IVS23 + 161 | 3561 | 3579 | | TTTTTTC | | UUUUUUUC |
| SCN1A- | 16686 | 16686 | 575 | TCATAAAGGTT | 935 | UCAUAAAGGU |
| IVS23 + 166 | 3556 | 3574 | | TTTTTTT | | UUUUUUUU |
| SCN1A- | 16686 | 16686 | 576 | TAAATTCATAA | 936 | UAAAUUCAUA |
| IVS23 + 171 | 3551 | 3569 | | AGGTTTT | | AAGGUUUU |
| SCN1A- | 16686 | 16686 | 577 | GAGGGTAAATT | 937 | GAGGGUAAAU |
| IVS23 + 176 | 3546 | 3564 | | CATAAAG | | UCAUAAAG |
| SCN1A- | 16686 | 16686 | 578 | CCACAGAGGGT | 938 | CCACAGAGGGU |
| IVS23 + 181 | 3541 | 3559 | | AAATTCA | | AAAUUCA |
| SCN1A- | 16686 | 16686 | 579 | AAAATCCACAG | 939 | AAAAUCCACAG |
| IVS23 + 186 | 3536 | 3554 | | AGGGTAA | | AGGGUAA |
| SCN1A- | 16686 | 16686 | 580 | GGGTTAAAATC | 940 | GGGUUAAAAU |
| IVS23 + 191 | 3531 | 3549 | | CACAGAG | | CCACAGAG |
| SCN1A- | 16686 | 16686 | 581 | CATTGGGATTA | 941 | CAUUGGGAUU |
| IVS23 + 196 | 3526 | 3544 | | AAATCCA | | AAAAUCCA |
| SCN1A- | 16686 | 16686 | 582 | TCAACCATTAG | 942 | UCAACCAUUAG |
| IVS23 + 201 | 3521 | 3539 | | GGTTAAA | | GGUUAAA |
| SCN1A- | 16686 | 16686 | 583 | AGATATCAACC | 943 | AGAUAUCAACC |
| IVS23 + 206 | 3516 | 3534 | | ATTGGGA | | AUUGGGA |
| SCN1A- | 16686 | 16686 | 584 | AATAAAGATAT | 944 | AAUAAAGAUA |
| IVS23 + 211 | 3511 | 3529 | | CAACCAT | | UCAACCAU |
| SCN1A- | 16686 | 16686 | 585 | AACTTAATAAA | 945 | AACUUAAUAA |
| IVS23 + 216 | 3506 | 3524 | | GATATCA | | AGAUAUCA |
| SCN1A- | 16686 | 16686 | 586 | AATGAAACTTA | 946 | AAUGAAACUU |
| IVS23 + 221 | 3501 | 3519 | | ATAAAGA | | AAUAAAGA |
| SCN1A- | 16686 | 16686 | 587 | TATTCAATGAA | 947 | UAUUCAAUGA |
| IVS23 + 226 | 3496 | 3514 | | ACTTAAT | | AACUUAAU |
| SCN1A- | 16686 | 16686 | 588 | AATCATATTCA | 948 | AAUCAUAUUCA |
| IVS23 + 231 | 3491 | 3509 | | ATGAAAC | | AUGAAAC |
| SCN1A- | 16686 | 16686 | 589 | AACTAAATCAT | 949 | AACUAAAUCAU |
| IVS23 + 236 | 3486 | 3504 | | ATTCAAT | | AUUCAAU |
| SCN1A- | 16686 | 16686 | 590 | CACATAACTAA | 950 | CACAUAACUAA |
| IVS23 + 241 | 3481 | 3499 | | ATCATAT | | AUCAUAU |
| SCN1A- | 16686 | 16686 | 591 | ATATACACATAA | 951 | AUAUACACAUA |
| IVS23 + 246 | 3476 | 3494 | | CTAAAT | | ACUAAAU |
| SCN1A- | 16686 | 16686 | 592 | ACTCCATATAC | 952 | ACUCCAUAUAC |
| IVS23 + 251 | 3471 | 3489 | | ACATAAC | | ACAUAAC |
| SCN1A- | 16686 | 16686 | 593 | GGATAACTCCA | 953 | GGAUAACUCCA |
| IVS23 + 256 | 3466 | 3484 | | TATACAC | | UAUACAC |
| SCN1A- | 16686 | 16686 | 594 | AAGATGGATAA | 954 | AAGAUGGAUA |
| IVS23 + 261 | 3461 | 3479 | | CTCCATA | | ACUCCAUA |
| SCN1A- | 16686 | 16686 | 595 | CCCCAAAGATG | 955 | CCCCAAAGAUG |
| IVS23 + 266 | 3456 | 3474 | | GATAACT | | GAUAACU |
| SCN1A- | 16686 | 16686 | 596 | AATCTCCCCAA | 956 | AAUCUCCCCAA |
| IVS23 + 271 | 3451 | 3469 | | AGATGGA | | AGAUGGA |
| SCN1A- | 16686 | 16686 | 597 | CCAGTAATCTC | 957 | CCAGUAAUCUC |
| IVS23 + 276 | 3446 | 3464 | | CCCAAAG | | CCCAAAG |
| SCN1A- | 16686 | 16686 | 598 | CCAATCCAGTA | 958 | CCAAUCCAGUA |
| IVS23 + 281 | 3441 | 3459 | | ATCTCCC | | AUCUCCC |
| SCN1A- | 16686 | 16686 | 599 | CCTCACCAATC | 959 | CCUCACCAAUC |
| IVS23 + 286 | 3436 | 3454 | | CAGTAAT | | CAGUAAU |
| SCN1A- | 16686 | 16686 | 600 | CCCGCCCTCAC | 960 | CCCGCCCUCAC |
| IVS23 + 291 | 3431 | 3449 | | CAATCCA | | CAAUCCA |
| SCN1A- | 16686 | 16686 | 601 | GGTCCCCCGCC | 961 | GGUCCCCCGCC |
| IVS23 + 296 | 3426 | 3444 | | CTCACCA | | CUCACCA |
| SCN1A- | 16686 | 16686 | 602 | ACCAGGGTCCC | 962 | ACCAGGGUCCC |
| IVS23 + 301 | 3421 | 3439 | | CCGCCCT | | CCGCCCU |
| SCN1A- | 16686 | 16686 | 603 | TCTACACCAGG | 963 | UCUACACCAGG |
| IVS23 + 306 | 3416 | 3434 | | GTCCCCC | | GUCCCCC |
| SCN1A- | 16686 | 16686 | 604 | ATCATTCTACA | 964 | AUCAUUCUACA |
| IVS23 + 311 | 3411 | 3429 | | CCAGGGT | | CCAGGGU |
| SCN1A- | 16686 | 16686 | 605 | ACATAATCATTC | 965 | ACAUAAUCAUU |
| IVS23 + 316 | 3406 | 3424 | | TACACC | | CUACACC |
| SCN1A- | 16686 | 16686 | 606 | TTTTCACATAAT | 966 | UUUUCACAUAA |
| IVS23 + 321 | 3401 | 3419 | | CATTCT | | UCAUUCU |
| SCN1A- | 16686 | 16686 | 607 | TTGTTTTTTCAC | 967 | UUGUUUUUUC |
| IVS23 + 326 | 3396 | 3414 | | ATAATC | | ACAUAAUC |
| SCN1A- | 16686 | 16686 | 608 | TTAAATTGTTTT | 968 | UUAAAUUGUU |
| IVS23 + 331 | 3391 | 3409 | | TTCACA | | UUUUCACA |
| SCN1A- | 16686 | 16686 | 609 | ACAAGTTAAAT | 969 | ACAAGUUAAA |
| IVS23 + 336 | 3386 | 3404 | | TGTTTTT | | UUGUUUUU |
| SCN1A- | 16686 | 16686 | 610 | GCTTAACAAGT | 970 | GCUUAACAAGU |
| IVS23 + 341 | 3381 | 3399 | | TAAATTG | | UAAAUUG |
| SCN1A- | 16686 | 16686 | 611 | CATGAGCTTAA | 971 | CAUGAGCUUAA |
| IVS23 + 346 | 3376 | 3394 | | CAAGTTA | | CAAGUUA |
| SCN1A- | 16686 | 16686 | 612 | AGTATCATGAG | 972 | AGUAUCAUGA |
| IVS23 + 351 | 3371 | 3389 | | CTTAACA | | GCUUAACA |
| SCN1A- | 16686 | 16686 | 613 | CAAACAGTATC | 973 | CAAACAGUAUC |
| IVS23 + 356 | 3366 | 3384 | | ATGAGCT | | AUGAGCU |
| SCN1A- | 16686 | 16686 | 614 | TGCCTCAAACA | 974 | UGCCUCAAACA |
| IVS23 + 361 | 3361 | 3379 | | GTATCAT | | GUAUCAU |
| SCN1A- | 16686 | 16686 | 615 | CTGTATGCCTC | 975 | CUGUAUGCCUC |
| IVS23 + 366 | 3356 | 3374 | | AAACAGT | | AAACAGU |
| SCN1A- | 16686 | 16686 | 616 | AGGGACTGTAT | 976 | AGGGACUGUA |
| IVS23 + 371 | 3351 | 3369 | | GCCTCAA | | UGCCUCAA |
| SCN1A- | 16686 | 16686 | 617 | ACAGCAGGGA | 977 | ACAGCAGGGAC |
| IVS23 + 376 | 3346 | 3364 | | CTGTATGC | | UGUAUGC |
| SCN1A- | 16686 | 16686 | 618 | ACTAAACAGCA | 978 | ACUAAACAGCA |
| IVS23 + 381 | 3341 | 3359 | | AGGGCTG | | AGGGCUG |
| SCN1A- | 16686 | 16686 | 619 | AATGTACTAAA | 979 | AAUGUACUAA |
| IVS23 + 386 | 3336 | 3354 | | CAGCAGG | | ACAGCAGG |
| SCN1A- | 16686 | 16686 | 620 | AGACCAATGTA | 980 | AGACCAAUGUA |
| IVS23 + 391 | 3331 | 3349 | | CTAAACA | | CUAAACA |
| SCN1A- | 16686 | 16686 | 621 | GACCCAGACCA | 981 | GACCCAGACCA |
| IVS23 + 396 | 3326 | 3344 | | ATGTACT | | AUGUACU |
| SCN1A- | 16686 | 16686 | 622 | TTCAGGACCCA | 982 | UUCAGGACCCA |
| IVS23 + 401 | 3321 | 3339 | | GACCAAT | | GACCAAU |
| SCN1A- | 16686 | 16686 | 623 | TAATTTTCAGG | 983 | UAAUUUUCAG |
| IVS23 + 406 | 3316 | 3334 | | ACCCAGA | | GACCCAGA |
| SCN1A- | 16686 | 16686 | 624 | ACTGGTAATTT | 984 | ACUGGUAAUU |
| IVS23 + 411 | 3311 | 3329 | | TCAGGAC | | UUCAGGAC |
| SCN1A- | 16686 | 16686 | 625 | ATCTAACTGGT | 985 | AUCUAACUGGU |
| IVS23 + 416 | 3306 | 3324 | | AATTTTC | | AAUUUUC |
| SCN1A- | 16686 | 16686 | 626 | ATGGTATCTAA | 986 | AUGGUAUCUA |
| IVS23 + 421 | 3301 | 3319 | | CTGGTAA | | ACUGGUAA |
| SCN1A- | 16686 | 16686 | 627 | AACTGATGGTA | 987 | AACUGAUGGU |
| IVS23 + 426 | 3296 | 3314 | | TCTAACT | | AUCUAACU |
| SCN1A- | 16686 | 16686 | 628 | TAATCAACTGA | 988 | UAAUCAACUGA |
| IVS23 + 431 | 3291 | 3309 | | TGGTATC | | UGGUAUC |
| SCN1A- | 16686 | 16686 | 629 | ATCAATAATCA | 989 | AUCAAUAAUCA |
| IVS23 + 436 | 3286 | 3304 | | ACTGATG | | ACUGAUG |
| SCN1A- | 16686 | 16686 | 630 | TACATATCAATA | 990 | UACAUAUCAAU |
| IVS23 + 441 | 3281 | 3299 | | ATCAAC | | AAUCAAC |
| SCN1A- | 16686 | 16686 | 631 | GCTCATACATAT | 991 | GCUCAUACAUA |
| IVS23 + 446 | 3276 | 3294 | | CAATAA | | UCAAUAA |
| SCN1A- | 16686 | 16686 | 632 | TATCTGCTCATA | 992 | UAUCUGCUCAU |
| IVS23 + 451 | 3271 | 3289 | | CATATC | | ACAUAUC |
| SCN1A- | 16686 | 16686 | 633 | CCTAGTATCTG | 993 | CCUAGUAUCUG |
| IVS23 + 456 | 3266 | 3284 | | CTCATAC | | CUCAUAC |
| SCN1A- | 16686 | 16686 | 634 | TGCACCCTAGT | 994 | UGCACCCUAGU |
| IVS23 + 461 | 3261 | 3279 | | ATCTGCT | | AUCUGCU |
| SCN1A- | 16686 | 16686 | 635 | AATATTGCACC | 995 | AAUAUUGCACC |
| IVS23 + 466 | 3256 | 3274 | | CTAGTAT | | CUAGUAU |
| SCN1A- | 16686 | 16686 | 636 | CCTGAAATATT | 996 | CCUGAAAUAUU |
| IVS23 + 471 | 3251 | 3269 | | GCACCCT | | GCACCCU |
| SCN1A- | 16686 | 16686 | 637 | TGAAACCTGAA | 997 | UGAAACCUGAA |
| IVS23 + 476 | 3246 | 3264 | | ATATTGC | | AUAUUGC |
| SCN1A- | 16686 | 16686 | 638 | TCTTATGAAAC | 998 | UCUUAUGAAAC |
| IVS23 + 481 | 3241 | 3259 | | CTGAAAT | | CUGAAAU |
| SCN1A- | 16686 | 16686 | 639 | ACCAGTCTTAT | 999 | ACCAGUCUUAU |
| IVS23 + 486 | 3236 | 3254 | | GAAACCT | | GAAACCU |
| SCN1A- | 16686 | 16686 | 640 | TCAATACCAGT | 1000 | UCAAUACCAGU |
| IVS23 + 491 | 3231 | 3249 | | CTTATGA | | CUUAUGA |
| SCN1A- | 16686 | 16686 | 641 | CACAATCAATA | 1001 | CACAAUCAAUA |
| IVS23 + 496 | 3226 | 3244 | | CCAGTCT | | CCAGUCU |
| SCN1A- | 16686 | 16686 | 642 | GTGGTCACAAT | 1002 | GUGGUCACAAU |
| IVS23 + 501 | 3221 | 3239 | | CAATACC | | CAAUACC |
| SCN1A- | 16686 | 16686 | 643 | TGAGAGTGGTC | 1003 | UGAGAGUGGU |
| IVS23 + 506 | 3216 | 3234 | | ACAATCA | | CACAAUCA |
| SCN1A- | 16686 | 16686 | 644 | AAAAATGAGA | 1004 | AAAAAUGAGA |
| IVS23 + 511 | 3211 | 3229 | | GTGGTCAC | | GUGGUCAC |
| SCN1A- | 16686 | 16686 | 645 | CAATAAAAAAT | 1005 | CAAUAAAAAA |
| IVS23 + 516 | 3206 | 3224 | | GAGAGTG | | UGAGAGUG |
| SCN1A- | 16686 | 16686 | 646 | TTACACAATAA | 1006 | UUACACAAUAA |
| IVS23 + 521 | 3201 | 3219 | | AAAATGA | | AAAAUGA |
| SCN1A- | 16686 | 16686 | 647 | TGAACTTACAC | 1007 | UGAACUUACAC |
| IVS23 + 526 | 3196 | 3214 | | AATAAAA | | AAUAAAA |
| SCN1A- | 16686 | 16686 | 648 | CCATATGAACT | 1008 | CCAUAUGAACU |
| IVS23 + 531 | 3191 | 3209 | | TACACAA | | UACACAA |
| SCN1A- | 16686 | 16686 | 649 | TAACCCCATAT | 1009 | UAACCCCAUAU |
| IVS23 + 536 | 3186 | 3204 | | GAACTTA | | GAACUUA |
| SCN1A- | 16686 | 16686 | 650 | GAAAATAACCC | 1010 | GAAAAUAACCC |
| IVS23 + 541 | 3181 | 3199 | | CATATGA | | CAUAUGA |
| SCN1A- | 16686 | 16686 | 651 | ATTTTGAAAAT | 1011 | AUUUUGAAAA |
| IVS23 + 546 | 3176 | 3194 | | AACCCCA | | UAACCCCA |
| SCN1A- | 16686 | 16686 | 652 | TTAACATTTTG | 1012 | UUAACAUUUU |
| IVS23 + 551 | 3171 | 3189 | | AAAATAA | | GAAAAUAA |
| SCN1A- | 16686 | 16686 | 653 | CCTTGTTAACA | 1013 | CCUUGUUAACA |
| IVS23 + 556 | 3166 | 3184 | | TTTTGAA | | UUUUGAA |
| SCN1A- | 16686 | 16686 | 654 | TTTTGCCTTGTT | 1014 | UUUUGCCUUGU |
| IVS23 + 561 | 3161 | 3179 | | AACATT | | UAACAUU |
| SCN1A- | 16686 | 16686 | 655 | TATATTTTTGCC | 1015 | UAUAUUUUUG |
| IVS23 + 566 | 3156 | 3174 | | TTGTTA | | CCUUGUUA |
| SCN1A- | 16686 | 16686 | 656 | CTTAATATATTT | 1016 | CUUAAUAUAU |
| IVS23 + 571 | 3151 | 3169 | | TTGCCT | | UUUUGCCU |
| SCN1A- | 16686 | 16686 | 657 | TATTTCTTAATA | 1017 | UAUUUCUUAA |
| IVS23 + 576 | 3146 | 3164 | | TATTTT | | UAUAUUUU |
| SCN1A- | 16686 | 16686 | 658 | TCAACTATTTCT | 1018 | UCAACUAUUUC |
| IVS23 + 581 | 3141 | 3159 | | TAATAT | | UUAAUAU |
| SCN1A- | 16686 | 16686 | 659 | CTTATTCAACTA | 1019 | CUUAUUCAACU |
| IVS23 + 586 | 3136 | 3154 | | TTTCTT | | AUUUCUU |
| SCN1A- | 16686 | 16686 | 660 | ATGTGCTTATTC | 1020 | AUGUGCUUAU |
| IVS23 + 591 | 3131 | 3149 | | AACTAT | | UCAACUAU |
| SCN1A- | 16686 | 16686 | 661 | TTCACATGTGC | 1021 | UUCACAUGUGC |
| IVS23 + 596 | 3126 | 3144 | | TTATTCA | | UUAUUCA |
| SCN1A- | 16686 | 16686 | 662 | CACAATTCACA | 1022 | CACAAUUCACA |
| IVS23 + 601 | 3121 | 3139 | | TGTGCTT | | UGUGCUU |
| SCN1A- | 16686 | 16686 | 663 | TACAACACAAT | 1023 | UACAACACAAU |
| IVS23 + 606 | 3116 | 3134 | | TCACATG | | UCACAUG |
| SCN1A- | 16686 | 16686 | 664 | TTGTTTACAAC | 1024 | UUGUUUACAAC |
| IVS23 + 611 | 3111 | 3129 | | ACAATTC | | ACAAUUC |
| SCN1A- | 16686 | 16686 | 665 | ACTTTTTGTTTA | 1025 | ACUUUUUGUU |
| IVS23 + 616 | 3106 | 3124 | | CAACAC | | UACAACAC |
| SCN1A- | 16686 | 16686 | 666 | TTCTAACTTTTT | 1026 | UUCUAACUUUU |
| IVS23 + 621 | 3101 | 3119 | | GTTTAC | | UGUUUAC |
| SCN1A- | 16686 | 16686 | 667 | TTTTATTCTAAC | 1027 | UUUUAUUCUA |
| IVS23 + 626 | 3096 | 3114 | | TTTTTG | | ACUUUUUG |
| SCN1A- | 16686 | 16686 | 668 | GATTTTTTTATT | 1028 | GAUUUUUUUA |
| IVS23 + 631 | 3091 | 3109 | | CTAACT | | UUCUAACU |
| SCN1A- | 16686 | 16686 | 669 | AAGTGGATTTT | 1029 | AAGUGGAUUU |
| IVS23 + 636 | 3086 | 3104 | | TTTATTC | | UUUUAUUC |
| SCN1A- | 16686 | 16686 | 670 | CAAATAAGTGG | 1030 | CAAAUAAGUG |
| IVS23 + 641 | 3081 | 3099 | | ATTTTTT | | GAUUUUUU |
| SCN1A- | 16686 | 16686 | 671 | TAATTCAAATA | 1031 | UAAUUCAAAU |
| IVS23 + 646 | 3076 | 3094 | | AGTGGAT | | AAGUGGAU |
| SCN1A- | 16686 | 16686 | 672 | CTGCATAATTC | 1032 | CUGCAUAAUUC |
| IVS23 + 651 | 3071 | 3089 | | AAATAAG | | AAAUAAG |
| SCN1A- | 16686 | 16686 | 673 | CTATTCTGCATA | 1033 | CUAUUCUGCAU |
| IVS23 + 656 | 3066 | 3084 | | ATTCAA | | AAUUCAA |
| SCN1A- | 16686 | 16686 | 674 | GTATTCTATTCT | 1034 | GUAUUCUAUUC |
| IVS23 + 661 | 3061 | 3079 | | GCATAA | | UGCAUAA |
| SCN1A- | 16686 | 16686 | 675 | GGTATGTATTCT | 1035 | GGUAUGUAUU |
| IVS23 + 666 | 3056 | 3074 | | ATTCTG | | CUAUUCUG |
| SCN1A- | 16686 | 16686 | 676 | TTCTAGGTATGT | 1036 | UUCUAGGUAU |
| IVS23 + 671 | 3051 | 3069 | | ATTCTA | | GUAUUCUA |
| SCN1A- | 16686 | 16686 | 677 | TTTATTTCTAGG | 1037 | UUUAUUUCUA |
| IVS23 + 676 | 3046 | 3064 | | TATGTA | | GGUAUGUA |
| SCN1A- | 16686 | 16686 | 678 | TTTGTTTTATTT | 1038 | UUUGUUUUAU |
| IVS23 + 681 | 3041 | 3059 | | CTAGGT | | UUCUAGGU |
| SCN1A- | 16686 | 16686 | 679 | ACGTTTTTGTT | 1039 | ACGUUUUUGU |
| IVS23 + 686 | 3036 | 3054 | | TTATTTC | | UUUAUUUC |
| SCN1A- | 16686 | 16686 | 680 | ATAAGACGTTT | 1040 | AUAAGACGUU |
| IVS23 + 691 | 3031 | 3049 | | TTGTTTT | | UUUGUUUU |
| SCN1A- | 16686 | 16686 | 681 | TCATGATAAGA | 1041 | UCAUGAUAAG |
| IVS23 + 696 | 3026 | 3044 | | CGTTTTT | | ACGUUUUU |
| SCN1A- | 16686 | 16686 | 682 | AATACTCATGA | 1042 | AAUACUCAUGA |
| IVS23 + 701 | 3021 | 3039 | | TAAGACG | | UAAGACG |
| SCN1A- | 16686 | 16686 | 683 | ATCTTAATACTC | 1043 | AUCUUAAUACU |
| IVS23 + 706 | 3016 | 3034 | | ATGATA | | CAUGAUA |
| SCN1A- | 16686 | 16686 | 684 | ATTTTATCTTAA | 1044 | AUUUUAUCUU |
| IVS23 + 711 | 3011 | 3029 | | TACTCA | | AAUACUCA |
| SCN1A- | 16686 | 16686 | 685 | CTTAAATTTTAT | 1045 | CUUAAAUUUU |
| IVS23 + 716 | 3006 | 3024 | | CTTAAT | | AUCUUAAU |
| SCN1A- | 16686 | 16686 | 686 | TATGCCTTAAAT | 1046 | UAUGCCUUAAA |
| IVS23 + 721 | 3001 | 3019 | | TTTATC | | UUUUAUC |
| SCN1A- | 16686 | 16686 | 687 | GAGTTTATGCC | 1047 | GAGUUUAUGCC |
| IVS23 + 726 | 2996 | 3014 | | TTAAATT | | UUAAAUU |
| SCN1A- | 16686 | 16686 | 688 | GAAGTGAGTTT | 1048 | GAAGUGAGUU |
| IVS23 + 731 | 2991 | 3009 | | ATGCCTT | | UAUGCCUU |
| SCN1A- | 16686 | 16686 | 689 | TCTAAGAAGTG | 1049 | UCUAAGAAGU |
| IVS23 + 736 | 2986 | 3004 | | AGTTTAT | | GAGUUUAU |
| SCN1A- | 16686 | 16686 | 690 | CTTATTCTAAG | 1050 | CUUAUUCUAAG |
| IVS23 + 741 | 2981 | 2999 | | AAGTGAG | | AAGUGAG |
| SCN1A- | 16686 | 16686 | 691 | AGTTACTTATTC | 1051 | AGUUACUUAU |
| IVS23 + 746 | 2976 | 2994 | | TAAGAA | | UCUAAGAA |
| SCN1A- | 16686 | 16686 | 692 | TTGGGAGTTAC | 1052 | UUGGGAGUUA |
| IVS23 + 751 | 2971 | 2989 | | TTATTCT | | CUUAUUCU |
| SCN1A- | 16686 | 16686 | 693 | GTTAGTTGGGA | 1053 | GUUAGUUGGG |
| IVS23 + 756 | 2966 | 2984 | | GTTACTT | | AGUUACUU |
| SCN1A- | 16686 | 16686 | 694 | AGAAAGTTAGT | 1054 | AGAAAGUUAG |
| IVS23 + 761 | 2961 | 2979 | | TGGGAGT | | UUGGGAGU |
| SCN1A- | 16686 | 16686 | 695 | ATCCTAGAAAG | 1055 | AUCCUAGAAAG |
| IVS23 + 766 | 2956 | 2974 | | TTAGTTG | | UUAGUUG |
| SCN1A- | 16686 | 16686 | 696 | TTAAAATCCTA | 1056 | UUAAAAUCCUA |
| IVS23 + 771 | 2951 | 2969 | | GAAAGTT | | GAAAGUU |
| SCN1A- | 16686 | 16686 | 697 | ATGTTTTAAAA | 1057 | AUGUUUUAAA |
| IVS23 + 776 | 2946 | 2964 | | TCCTAGA | | AUCCUAGA |
| SCN1A- | 16686 | 16686 | 698 | GTGTTATGTTTT | 1058 | GUGUUAUGUU |
| IVS23 + 781 | 2941 | 2959 | | AAAATC | | UUAAAAUC |
| SCN1A- | 16686 | 16686 | 699 | TCACTGTGTTA | 1059 | UCACUGUGUUA |
| IVS23 + 786 | 2936 | 2954 | | TGTTTTA | | UGUUUUA |
| SCN1A- | 16686 | 16686 | 700 | TGTTTTCACTG | 1060 | UGUUUUCACUG |
| IVS23 + 791 | 2931 | 2949 | | TGTTATG | | UGUUAUG |
| SCN1A- | 16686 | 16686 | 701 | ATGTATGTTTTC | 1061 | AUGUAUGUUU |
| IVS23 + 796 | 2926 | 2944 | | ACTGTG | | UCACUGUG |
| SCN1A- | 16686 | 16686 | 702 | TGTTTATGTATG | 1062 | UGUUUAUGUA |
| IVS23 + 801 | 2921 | 2939 | | TTTTCA | | UGUUUUCA |
| SCN1A- | 16686 | 16686 | 703 | AGTTATGTTTAT | 1063 | AGUUAUGUUU |
| IVS23 + 806 | 2916 | 2934 | | GTATGT | | AUGUAUGU |
| SCN1A- | 16686 | 16686 | 704 | TGTAGAGTTAT | 1064 | UGUAGAGUUA |
| IVS23 + 811 | 2911 | 2929 | | GTTTATG | | UGUUUAUG |
| SCN1A- | 16686 | 16686 | 705 | TAAAATGTAGA | 1065 | UAAAAUGUAG |
| IVS23 + 816 | 2906 | 2924 | | GTTATGT | | AGUUAUGU |
| SCN1A- | 16686 | 16686 | 706 | ATAAATAAAAT | 1066 | AUAAAUAAAA |
| IVS23 + 821 | 2901 | 2919 | | GTAGAGT | | UGUAGAGU |
| SCN1A- | 16686 | 16686 | 707 | TAAGAATAAAT | 1067 | UAAGAAUAAA |
| IVS23 + 826 | 2896 | 2914 | | AAAATGT | | UAAAAUGU |
| SCN1A- | 16686 | 16686 | 708 | AACTTTAAGAA | 1068 | AACUUUAAGA |
| IVS23 + 831 | 2891 | 2909 | | TAAATAA | | AUAAAUAA |
| SCN1A- | 16686 | 16686 | 709 | ACTTAAACTTT | 1069 | ACUUAAACUUU |
| IVS23 + 836 | 2886 | 2904 | | AAGAATA | | AAGAAUA |
| SCN1A- | 16686 | 16686 | 710 | AATACACTTAA | 1070 | AAUACACUUAA |
| IVS23 + 841 | 2881 | 2899 | | ACTTTAA | | ACUUUAA |
| SCN1A- | 16686 | 16686 | 711 | TGTATAATACAC | 1071 | UGUAUAAUAC |
| IVS23 + 846 | 2876 | 2894 | | TTAAAC | | ACUUAAAC |
| SCN1A- | 16686 | 16686 | 712 | CTTCTTGTATAA | 1072 | CUUCUUGUAUA |
| IVS23 + 851 | 2871 | 2889 | | TACACT | | AUACACU |
| SCN1A- | 16686 | 16686 | 713 | CTCTTCTTCTTG | 1073 | CUCUUCUUCUU |
| IVS23 + 856 | 2866 | 2884 | | TATAAT | | GUAUAAU |
| SCN1A- | 16686 | 16686 | 714 | ATAAACTCTTC | 1074 | AUAAACUCUUC |
| IVS23 + 861 | 2861 | 2879 | | TTCTTGT | | UUCUUGU |
| SCN1A- | 16686 | 16686 | 715 | CGAATATAAAC | 1075 | CGAAUAUAAAC |
| IVS23 + 866 | 2856 | 2874 | | TCTTCTT | | UCUUCUU |
| SCN1A- | 16686 | 16686 | 716 | TCTCTCGAATAT | 1076 | UCUCUCGAAUA |
| IVS23 + 871 | 2851 | 2869 | | AAACTC | | UAAACUC |
| SCN1A- | 16686 | 16686 | 717 | TTCTGTCTCTC | 1077 | UUCUGUCUCUC |
| IVS23 + 876 | 2846 | 2864 | | GAATATA | | GAAUAUA |
| SCN1A- | 16686 | 16686 | 718 | ACTTTTTCTGT | 1078 | ACUUUUUCUGU |
| IVS23 + 881 | 2841 | 2859 | | CTCTCGA | | CUCUCGA |
| SCN1A- | 16686 | 16686 | 719 | TTCTGACTTTTT | 1079 | UUCUGACUUUU |
| IVS23 + 886 | 2836 | 2854 | | CTGTCT | | UCUGUCU |
| SCN1A- | 16686 | 16686 | 720 | AAAAATTCTGA | 1080 | AAAAAUUCUG |
| IVS23 + 891 | 2831 | 2849 | | CTTTTTC | | ACUUUUUC |
| SCN1A- | 16686 | 16686 | 721 | CAAACAAAAAT | 1081 | CAAACAAAAAU |
| IVS23 + 896 | 2826 | 2844 | | TCTGACT | | UCUGACU |
| SCN1A- | 16686 | 16686 | 722 | TGATCCAAACA | 1082 | UGAUCCAAACA |
| IVS23 + 901 | 2821 | 2839 | | AAAATTC | | AAAAUUC |
| SCN1A- | 16686 | 16686 | 723 | ATTGGTGATCC | 1083 | AUUGGUGAUCC |
| IVS23 + 906 | 2816 | 2834 | | AAACAAA | | AAACAAA |
| SCN1A- | 16686 | 16686 | 724 | GATATATTGGTG | 1084 | GAUAUAUUGG |
| IVS23 + 911 | 2811 | 2829 | | ATCCAA | | UGAUCCAA |
| SCN1A- | 16686 | 16686 | 725 | GCTATGATATAT | 1085 | GCUAUGAUAU |
| IVS23 + 916 | 2806 | 2824 | | TGGTGA | | AUUGGUGA |
| SCN1A- | 16686 | 16686 | 726 | TGTAAGCTATG | 1086 | UGUAAGCUAU |
| IVS23 + 921 | 2801 | 2819 | | ATATATT | | GAUAUAUU |
| SCN1A- | 16686 | 16686 | 727 | TTTTTTGTAAG | 1087 | UUUUUUGUAA |
| IVS23 + 926 | 2796 | 2814 | | CTATGAT | | GCUAUGAU |
| SCN1A- | 16686 | 16686 | 728 | ACAGTTTTTTT | 1088 | ACAGUUUUUU |
| IVS23 + 931 | 2791 | 2809 | | GTAAGCT | | UGUAAGCU |
| SCN1A- | 16686 | 16686 | 729 | TTAAGACAGTT | 1089 | UUAAGACAGU |
| IVS23 + 936 | 2786 | 2804 | | TTTTTGT | | UUUUUUGU |
| SCN1A- | 16686 | 16686 | 730 | TTTAATTAAGA | 1090 | UUUAAUUAAG |
| IVS23 + 941 | 2781 | 2799 | | CAGTTTT | | ACAGUUUU |
| SCN1A- | 16686 | 16686 | 731 | TGGGTTTTAAT | 1091 | UGGGUUUUAA |
| IVS23 + 946 | 2776 | 2794 | | TAAGACA | | UUAAGACA |
| SCN1A- | 16686 | 16686 | 732 | TGTTGTGGGTT | 1092 | UGUUGUGGGU |
| IVS23 + 951 | 2771 | 2789 | | TTAATTA | | UUUAAUUA |
| SCN1A- | 16686 | 16686 | 733 | AATTATGTTGT | 1093 | AAUUAUGUUG |
| IVS23 + 956 | 2766 | 2784 | | GGGTTTT | | UGGGUUUU |
| SCN1A- | 16686 | 16686 | 734 | AAAAAAATTAT | 1094 | AAAAAAAUUA |
| IVS23 + 961 | 2761 | 2779 | | GTTGTGG | | UGUUGUGG |
| SCN1A- | 16686 | 16686 | 735 | AATCTAAAAAA | 1095 | AAUCUAAAAA |
| IVS23 + 966 | 2756 | 2774 | | ATTATGT | | AAUUAUGU |
| SCN1A- | 16686 | 16686 | 736 | TTAAAAATCTA | 1096 | UUAAAAAUCU |
| IVS23 + 971 | 2751 | 2769 | | AAAAAAT | | AAAAAAAU |
| SCN1A- | 16686 | 16686 | 737 | CTTTCTTAAAA | 1097 | CUUUCUUAAAA |
| IVS23 + 976 | 2746 | 2764 | | ATCTAAA | | AUCUAAA |
| SCN1A- | 16686 | 16686 | 738 | AGAATCTTTCT | 1098 | AGAAUCUUUCU |
| IVS23 + 981 | 2741 | 2759 | | TAAAAAT | | UAAAAAU |
| SCN1A- | 16686 | 16686 | 739 | ATAATAGAATCT | 1099 | AUAAUAGAAU |
| IVS23 + 986 | 2736 | 2754 | | TTCTTA | | CUUUCUUA |

TABLE 8A
Exemplary ASOs to correct intron retention.

| SEQ | | | Re- |
|---|---|---|---|
| ID | | | tained |
| NO: | Name | Sequence (5′-3′) | Intron |
| 115 | SCN1A-IVS21 + 6 | CAGAGAAAAUAGUGUUCA | 21 |
| 116 | SCN1A-IVS21 + 11 | AUAUUCAGAGAAAAUAGU | 21 |
| 117 | SCN1A-IVS21 + 16 | UAAAAAUAUUCAGAGAAA | 21 |
| 118 | SCN1A-IVS21 + 21 | AACAAUAAAAAUAUUCAG | 21 |
| 119 | SCN1A-IVS21 + 26 | UUCCAAACAAUAAAAAUA | 21 |
| 120 | SCN1A-IVS21 + 31 | UAUUAUUCCAAACAAUAA | 21 |
| 121 | SCN1A-IVS21 + 36 | UUUGUUAUUAUUCCAAAC | 21 |
| 122 | SCN1A-IVS21 + 41 | AUUAUUUUGUUAUUAUUC | 21 |
| 123 | SCN1A-IVS21 + 46 | AUGUCAUUAUUUUGUUAU | 21 |
| 124 | SCN1A-IVS21 + 51 | GAUGUAUGUCAUUAUUUU | 21 |
| 125 | SCN1A-IVS21 + 56 | UAAUAGAUGUAUGUCAUU | 21 |
| 126 | SCN1A-IVS21 + 61 | CUAAAUAAUAGAUGUAUG | 21 |
| 127 | SCN1A-IVS21 + 66 | AGGAACUAAAUAAUAGAU | 21 |
| 128 | SCN1A-IVS21 + 71 | UUCUUAGGAACUAAAUAA | 21 |
| 129 | SCN1A-IVS21 + 76 | ACUUUUUCUUAGGAACUA | 21 |
| 130 | SCN1A-IVS21 + 81 | UAUAUACUUUUUCUUAGG | 21 |
| 131 | SCN1A-IVS21 − 16 | UGCAUGUUUUACUUUGGA | 21 |
| 132 | SCN1A-IVS21 − 21 | GUUUUACUUUGGAGUAAA | 21 |
| 133 | SCN1A-IVS21 − 26 | ACUUUGGAGUAAAAAUAA | 21 |
| 134 | SCN1A-IVS21 − 31 | GGAGUAAAAAUAAUUUAG | 21 |
| 135 | SCN1A-IVS21 − 36 | AAAAAUAAUUUAGACCUG | 21 |
| 136 | SCN1A-IVS21 − 41 | UAAUUUAGACCUGAUGUU | 21 |
| 137 | SCN1A-IVS21 − 46 | UAGACCUGAUGUUUAAUA | 21 |
| 138 | SCN1A-IVS21 − 51 | CUGAUGUUUAAUAAAUAU | 21 |
| 139 | SCN1A-IVS21 − 56 | GUUUAAUAAAUAUUCUUA | 21 |
| 140 | SCN1A-IVS21 − 61 | AUAAAUAUUCUUACUGAU | 21 |
| 141 | SCN1A-IVS21 − 66 | UAUUCUUACUGAUAUAAU | 21 |
| 142 | SCN1A-IVS21 − 71 | UUACUGAUAUAAUUUUCA | 21 |
| 143 | SCN1A-IVS21 − 76 | GAUAUAAUUUUCAAAAGG | 21 |
| 144 | SCN1A-IVS21 − 81 | AAUUUUCAAAAGGGAAUA | 21 |
| 145 | SCN1A-IVS21 − 27 | CUUUGGAGUAAAAAUAAU | 21 |
| 146 | SCN1A-IVS21 − 28 | UUUGGAGUAAAAAUAAUU | 21 |
| 148 | SCN1A-IVS21 − 29 | UUGGAGUAAAAAUAAUUU | 21 |
| 149 | SCN1A-IVS21 − 30 | UGGAGUAAAAAUAAUUUA | 21 |
| 150 | SCN1A-IVS21 − 32 | GAGUAAAAAUAAUUUAGA | 21 |
| 151 | SCN1A-IVS21 − 33 | AGUAAAAAUAAUUUAGAC | 21 |
| 152 | SCN1A-IVS21 − 34 | GUAAAAAUAAUUUAGACC | 21 |
| 153 | SCN1A-IVS21 − 35 | UAAAAAUAAUUUAGACCU | 21 |
| 154 | SCN1A-IVS21 − 72 | UACUGAUAUAAUUUUCAA | 21 |
| 155 | SCN1A-IVS21 − 73 | ACUGAUAUAAUUUUCAAA | 21 |
| 156 | SCN1A-IVS21 − 74 | CUGAUAUAAUUUUCAAAA | 21 |
| 157 | SCN1A-IVS21 − 75 | UGAUAUAAUUUUCAAAAG | 21 |
| 158 | SCN1A-IVS21 − 77 | AUAUAAUUUUCAAAAGGG | 21 |
| 159 | SCN1A-IVS21 − 78 | UAUAAUUUUCAAAAGGGA | 21 |
| 160 | SCN1A-IVS21 − 79 | AUAAUUUUCAAAAGGGAA | 21 |
| 161 | SCN1A-IVS21 − 80 | UAAUUUUCAAAAGGGAAU | 21 |
| 162 | | CAAGGAUUAAAGGUAGCA | 21 |

TABLE 8B
Exemplary ASOs to correct intron retention.

| SEQ | | | Re- |
|---|---|---|---|
| ID | | | tained |
| NO: | Name | Sequence (5′-3′) | Intron |
| 163 | SCN1A-IVS21 + 6 | CAGAGAAAATAGTGTTCA | 21 |
| 164 | SCN1A-IVS21 + 11 | ATATTCAGAGAAAATAGT | 21 |
| 165 | SCN1A-IVS21 + 16 | TAAAAATATTCAGAGAAA | 21 |
| 166 | SCN1A-IVS21 + 21 | AACAATAAAAATATTCAG | 21 |
| 167 | SCN1A-IVS21 + 26 | TTCCAAACAATAAAAATA | 21 |
| 168 | SCN1A-IVS21 + 31 | TATTATTCCAAACAATAA | 21 |
| 169 | SCN1A-IVS21 + 36 | TTTGTTATTATTCCAAAC | 21 |
| 170 | SCN1A-IVS21 + 41 | ATTATTTTGTTATTATTC | 21 |
| 171 | SCN1A-IVS21 + 46 | ATGTCATTATTTTGTTAT | 21 |
| 172 | SCN1A-IVS21 + 51 | GATGTATGTCATTATTTT | 21 |
| 173 | SCN1A-IVS21 + 56 | TAATAGATGTATGTCATT | 21 |
| 174 | SCN1A-IVS21 + 61 | CTAAATAATAGATGTATG | 21 |
| 175 | SCN1A-IVS21 + 66 | AGGAACTAAATAATAGAT | 21 |
| 176 | SCN1A-IVS21 + 71 | TTCTTAGGAACTAAATAA | 21 |
| 177 | SCN1A-IVS21 + 76 | ACTTTTTCTTAGGAACTA | 21 |
| 178 | SCN1A-IVS21 + 81 | TATATACTTTTTCTTAGG | 21 |
| 179 | SCN1A-IVS21 − 16 | TGCATGTTTTACTTTGGA | 21 |
| 180 | SCN1A-IVS21 − 21 | GTTTTACTTTGGAGTAAA | 21 |
| 181 | SCN1A-IVS21 − 26 | ACTTTGGAGTAAAAATAA | 21 |
| 182 | SCN1A-IVS21 − 31 | GGAGTAAAAATAATTTAG | 21 |
| 183 | SCN1A-IVS21 − 36 | AAAAATAATTTAGACCTG | 21 |
| 184 | SCN1A-IVS21 − 41 | TAATTTAGACCTGATGTT | 21 |
| 185 | SCN1A-IVS21 − 46 | TAGACCTGATGTTTAATA | 21 |
| 186 | SCN1A-IVS21 − 51 | CTGATGTTTAATAAATAT | 21 |
| 187 | SCN1A-IVS21 − 56 | GTTTAATAAATATTCTTA | 21 |
| 188 | SCN1A-IVS21 − 61 | ATAAATATTCTTACTGAT | 21 |
| 189 | SCN1A-IVS21 − 66 | TATTCTTACTGATATAAT | 21 |
| 190 | SCN1A-IVS21 − 71 | TTACTGATATAATTTTCA | 21 |
| 191 | SCN1A-IVS21 − 76 | GATATAATTTTCAAAAGG | 21 |
| 192 | SCN1A-IVS21 − 81 | AATTTTCAAAAGGGAATA | 21 |
| 193 | SCN1A-IVS21 − 27 | CTTTGGAGTAAAAATAAT | 21 |
| 194 | SCN1A-IVS21 − 28 | TTTGGAGTAAAAATAATT | 21 |
| 195 | SCN1A-IVS21 − 29 | TTGGAGTAAAAATAATTT | 21 |
| 196 | SCN1A-IVS21 − 30 | TGGAGTAAAAATAATTTA | 21 |
| 197 | SCN1A-IVS21 − 32 | GAGTAAAAATAATTTAGA | 21 |
| 198 | SCN1A-IVS21 − 33 | AGTAAAAATAATTTAGAC | 21 |
| 199 | SCN1A-IVS21 − 34 | GTAAAAATAATTTAGACC | 21 |
| 200 | SCN1A-IVS21 − 35 | TAAAAATAATTTAGACCT | 21 |
| 201 | SCN1A-IVS21 − 72 | TACTGATATAATTTTCAA | 21 |
| 202 | SCN1A-IVS21 − 73 | ACTGATATAATTTTCAAA | 21 |
| 203 | SCN1A-IVS21 − 74 | CTGATATAATTTTCAAAA | 21 |
| 204 | SCN1A-IVS21 − 75 | TGATATAATTTTCAAAAG | 21 |
| 205 | SCN1A-IVS21 − 77 | ATATAATTTTCAAAAGGG | 21 |
| 206 | SCN1A-IVS21 − 78 | TATAATTTTCAAAAGGGA | 21 |
| 207 | SCN1A-IVS21 − 79 | ATAATTTTCAAAAGGGAA | 21 |
| 208 | SCN1A-IVS21 − 80 | TAATTTTCAAAAGGGAAT | 21 |
| 209 | | CAAGGATTAAAGGTAGCA | 21 |

### Example 15: Alternative Splicing of SCN1A Pre-mRNA that Results in NMD is Conserved in Multiple Species and in a DS Patient

[0567] Bioinformatic analysis of human brain samples revealed an exon inclusion event in the SCN1A gene that leads to a frameshift and the introduction of a premature termination codon. This example demonstrates validation of this non-productive splicing event in various species, including in a human DS patient.

[0568] FIG. 13A shows a schematic representation and validation of this non-productive splicing event by RT-PCR of human cells treated with or without the translation inhibitor, cycloheximide (CHX). The productive (canonical) isoform (bottom band) does not contain the alternative exon and translates into functional Na_{V}1.1 protein. The non-productive isoform contains the alternative exon (top band). DMSO: Dimethyl sulfoxide, CHX: Cycloheximide.

[0569] BLAST searches of the NCBI database identified highly conserved homologs of this SCN1A NMD-inducing exon in multiple species and the results were verified by RT-PCR (FIG. 13B). Moreover, the presence of the NMD-inducing exon inclusion event is retained in brain tissues from a DS patient (FIG. 13B), suggesting that the level of the NMD-exon inclusion event is unchanged between healthy and DS individuals. FIG. 13B shows TBE-PAGE of the RT-PCR products of SCN1A transcripts in cerebral cortex from a healthy female subject, a DS patient, a cynomolgus monkey, a DS mouse, a WT mouse (C57BL/6J) and a Sprague Dawley rat. Canonical SCN1A transcript is represented by the lower bands and product corresponding to the NMD-exon inclusion is represented by the upper bands. Patient variants located in the NMD-inducing exon region that was identified here have been shown to cause an increase in NMD-exon inclusion levels and a reduction of productive mRNA leading to DS. See Carvill et al., Am J Hum Genet 103, 1022-1029 (2018).

[0570] RT-PCR analysis was also performed to measure the inclusion level of the NMD-inducing exon and productive Scn1a mRNA in coronal brain sections from P0-P20 and 10-month-old WT C57BL/6J mice (FIG. 13C). Densitometric measurement of the RT-PCR products showed that the NMD-inducing exon containing transcript (upper band) is largely unchanged during development while the productive mRNA (lower band) increases (FIG. 13D). Productive Scn1a transcript levels (FIG. 13D) begin to increase dramatically around P7-8. As shown in FIG. 13D, expression of Scn1a transcripts was first normalized to endogenous Gapdh and then to the Scn1a productive transcript at P0. Data are presented as mean±SD in the figure (n=2 or 3 samples from individual animals for each data point). Expression of Scn1a productive transcript was fit to a four-parameter non-linear curve. Expression of Scn1a non-productive transcript was best fit to a linear curve. These results suggested that it may be possible to increase total productive transcript levels by converting NMD-exon containing transcripts to productive transcripts and that the impact of this manipulation would be the greatest during early postnatal brain development.

### Example 16: ASO Administration Increases SCN1A Expression in Cultured Human Cells and Mouse Brain

[0571] A series of ASOs were designed, which bind to human SCN1A exon 20X and the surrounding intronic sequences. All ASOs used in the initial screening were based on 2′-methoxy-ethyl (MOE) modification of the oligonucleotide with a phosphorothioate backbone. ASOs were screened in human neural progenitor cells by free uptake, followed by analysis of SCN1A productive and exon 20X-containing nonproductive transcripts with RT-PCR and qPCR. As shown in FIG. 14A, a total of 47 ASOs were screened at 20 μM. A non-targeting ASO (NT) and no ASO control (−) were included. RPL32 was used as loading control. A number of ASOs were identified that significantly decreased the NMD-inducing exon inclusion and increased productive transcript expression (FIGS. 14A-14C). The most active ASO (ASO-22, indicated by the arrows in FIGS. 14A-14C) was selected for further evaluation. It was confirmed that the effect of ASO-22 is dose-dependent (FIG. 15). A non-targeting ASO control (NT) had no effect on the level of either transcript isoform (FIG. 15).

[0572] Dose-response relationships for ASO-22 were determined in human neural progenitor cells using free uptake or nucleofection delivery methods. The EC50 values were 3 μM, determined by free uptake, and 529 nM, determined by nucleofection (FIG. 14D). The specificity of ASO-22 was also assessed by measuring its effect on the expression of four highly homologous VGSC α subunit genes in treated cells. No change in the expression levels of SCN2A, SCN3A, SCN8A, or SCN9A were observed in ReNcells following 20, 8 or 3 μM ASO treatment via free uptake (FIG. 14E). These results indicate that ASO-22 potently and specifically increases productive SCN1A mRNA in human neural progenitor cells.

[0573] FIG. 14A shows ASO screen in ReNcells. TBE PAGE of RT-PCR products corresponding to SCN1A productive (lower bands, 549 bp) and non-productive mRNA containing exon 20X (upper bands, 613 bp) in ReNcells after gymnotic (free) uptake of ASO. FIG. 14B shows percentage of exon 20X inclusion in SCN1A transcript, as quantified from the RT-PCR products shown in FIG. 14A. PCR products were quantified by densitometry and plotted as percentage of the exon 20X-containing mRNA over total (exon 20X-containing and productive mRNA). n=1 for each ASO treatment group; n=2 for NT; n=11 for sham. FIG. 14C shows expression of SCN1A productive mRNA in ASO-treated ReNcells determined by SYBR green qPCR. Expression of SCN1A productive mRNA was first normalized to endogenous RPL32 and then to no ASO control (−). qPCR results were presented as mean±SD for each treatment. n=1 for each ASO treatment; n=2 for NT; n=10 for sham. FIG. 14D demonstrates the dose-response relationship of ASO-22 in ReNcells with free uptake and nucleofection. Expression of SCN1A was normalized to endogenous RPL32 and then to no ASO control. qPCR results were presented as mean±SD (n=2 for both treatments). Expression of SCN1A productive transcript was fit to four-parameter non-linear curves. FIG. 14E demonstrates effect of selected ASOs on expression of homologous VGSC α subunit genes in ReNcells. Expression of SCN2A, 3A, 8A, and 9A in ReNcells was measured by probe-based qPCR, following gymnotic uptake of 20, 8 or 3 μM of ASO-22 or a non-target. ASO control (NT). SON mRNA levels were first normalized to endogenous Gapdh and then to no ASO (−) treated cells. qPCR results were presented as mean±SD for each analysis (n=4 for each ASO treatment; n=8 for no ASO control.

[0574] FIGS. 15A-15C shows dose-dependent effects of ASO-22 on splicing and expression of SCN1A mRNA in ReNcells. ReNcells were treated with 20, 8, or 3 μM of ASO-22 for 72 h by gymnotic uptake, followed by DMSO or cycloheximide (CHX) treatment for 3 h before harvesting. A non-targeting ASO control (NT) and no ASO control (sham) were included. FIG. 15A shows TBE PAGE of RT-PCR products corresponding to SCN1A productive mRNA (lower bands, 549 bp) and non-productive mRNA containing exon 20X (upper bands, 613 bp) in ReNcells. RPL32 was used as the loading control. Expression of SCN1A transcript in ReNcells after gymnotic uptake of ASO-22 was quantified by probe-based qPCR. The levels of SCN1A productive (FIG. 15B) and non-productive (FIG. 15C) mRNA were measured separately with two qPCR assays (see description in the Methods). Transcript expression was first normalized to the endogenous RPL32 signal and then to the no ASO (sham) control. Sham qPCR results are presented as mean±SD for each group. (Independent repeats of experiment: n=1 for ASO-22 treatment; n=3 for sham; n=3 for sham+CHX).

[0575] To determine whether ASO-22 administration can upregulate productive mRNA and protein in a dose-dependent manner in vivo, P2 WT C57BL/6J mice were dosed with a single ICV injection of ASO-22 at 0.3, 1, 3, 5, 10, 20 or 30 μg and euthanized 5 days after treatment (FIG. 16A). Brain tissues were collected and analyzed for changes in levels of non-productive and productive Scn1a transcripts, respectively, as well as Na_{V}1.1 protein. Inclusion of the NMD exon in Scn1a transcript decreased with increasing ASO dose (FIG. 16B). A dose-dependent increase in productive Scn1a expression was also observed using probe-based qPCR (FIG. 16C) and RT-PCR (FIG. 17), with a ˜6-fold increase in expression level detected in the 10-μg dose group and no further increase was observed at 20 and 30 μg. Finally, expression levels of Na_{V}1.1 protein increased in a similar dose-dependent manner (FIG. 16D and FIG. 18). A non-targeting ASO control (NT) had no effect on the level of either Scn1a transcript or Na_{V}1.1. The expression of eight closely related VGSC α subunit genes plus Nax (Scn7a) were unaffected in the brains of mice that had received the ASO (FIG. 16E).

[0576] To determine the durability of the ASO-22 effect in brain, P2 WT mice ICV-injected with 10 μg of ASO-22 were examined for brain expression of Scn1a productive transcript levels at varying time points after injection (FIG. 16F). Increased levels of productive Scn1a transcript were observed for up to 30 days post injection (FIG. 16G and FIG. 19). Levels of Na_{V}1.1 protein also increased and were maintained during the 30-day observation period compared to PBS injection controls (FIG. 16H and FIG. 20).

[0577] FIG. 16A shows experimental design for ASO-22 dose-response relationship in vivo. FIG. 16B shows percentage of NMD-inducing exon inclusion in Scn1a transcript in mouse brains, as quantified by densitometry of TBE PAGE RT-PCR products (gels shown in FIG. 17). Quantification results are presented as mean±SD (n=3-14 for each treatment group). Plotted data in FIG. 16B were fit to a four-parameter non-linear curve. Similar to PBS treated animals, the percentage of NMD-inducing exon inclusion for NT ASO treatment group was 45.8%±0.7%. FIG. 16C shows fold changes in expression of Scn1a productive transcript in mouse brains, as quantified by probe-based qPCR. qPCR results are presented as mean±SD (n=3-14 for each treatment group). Plotted data were fit to a four-parameter non-linear curve. Similar to PBS treated animals, the fold change in Scn1a mRNA for the NT ASO treatment group was 0.9 ±0.1. FIG. 16D shows fold changes in expression of Na_{V}1.1 protein in mouse, as quantified by the Meso Scale Discovery (MSD) method. Quantification results are presented as mean±SD (n=3-8 for each treatment group). Plotted data were fit to a four-parameter non-linear curve. Similar to PBS treated animals, Na_{V}1.1 expression for the NT ASO treatment group was 16.8%±0.9% compared to adult brain. FIG. 16E shows effect of ASO-22 on expression of the 9 VGSC α subunit genes plus Nax (Scn7a) expressed in mouse brain. Expression of Scn1a productive transcript and the remaining 8 VGSC α subunit genes plus Nax (Scn7a) in mouse brains following ICV injection of PBS, a non-target ASO control (NT, 20 μg) or different doses of ASO-22 was measured by probe-based qPCR. Expression of each transcript was first normalized to endogenous Gapdh then compared to PBS injection controls. qPCR assays used here are listed in the Methods. Data are presented as mean±SD (n=3-14 for each treatment group). FIG. 16F shows experimental design for assessment of duration of effect in mouse brains following ICV injection of ASO-22. FIG. 16G shows quantification of Scn1a productive transcript in mouse brains at selected days post injection of 10 μg of ASO-22 at P2. Scn1a transcript was first normalized to endogenous Gapdh, then compared to mouse brains 1 day after receiving the PBS injection. qPCR results were presented as mean±SD (n=4-9 for each treatment group). Plotted data were fit to a four-parameter non-linear curve. FIG. 16H shows fold changes in expression of Na_{V}1.1 protein in mouse brains at selected days post injection of 10 μg of ASO-22 at P2. Na_{V}1.1 protein expression was quantified by the MSD method. MSD results were presented as mean±SD (n=4-5 randomly selected samples from each treatment group).

[0578] FIG. 17 shows dose-dependent effects of ASO-22 on expression of Scn1a in ICV-injected neonatal mouse brains. WT C57BL/6J mice were ICV injected with PBS, a non-target (NT, 20 μg) control, 0.3, 1, 3, 5, 10, 20 or 30 μg of ASO-22 at P2. Brains were harvested 5 days after injection and analyzed for Scn1a mRNA expression. TBE PAGE of RT-PCR products shows Scn1a productive (bottom bands, 498 bp, indicated by *) and NMD-inducing transcript (upper bands, 562 bp, indicated by §) in mouse brains. Quantification of the percentage of exon 21X inclusion is shown in FIG. 16B. Quantification of the Scn1a productive mRNA expression by qPCR is shown in FIG. 16C. M: DNA ladder, NEB, N3231L.

[0579] FIG. 18 shows dose-dependent effects of ASO-22 on expression of Na_{V}1.1 in ICV-injected neonatal mouse brains. WT C57BL/6J mice were ICV injected with 0.3, 1, 3 or 10 μg of ASO-22 or PBS at P2. Brains were harvested 5 days after injection and analyzed for Na_{V}1.1 expression. Na_{V}1.1 expression (˜223 kDa, indicated by *) was assessed by immunoblotting of two randomly selected brain samples from each dosing group. 50 μg of protein was loaded per lane. Ponceau S-stained blots are included to show equal loading. Half input of protein from a brain injected with 10 μg of ASO was included for testing signal saturation of the immunoblotting. Brain samples from untreated Scn1a^{31/-} and WT littermate mice were included as controls. Quantification of Na_{V}1.1 expression by Meso Scale Discovery (MSD) method is shown in FIG. 16D.

[0580] FIG. 19 shows Expression of Scn1a mRNA in mouse brains at different post-injection days. WT C57BL/6J mice were ICV injected with 3 or 10 μg of ASO-22 or PBS at P2. Brains were harvested 1, 3, 5, 10, 20 or 30 days after injection and analyzed for Scn1a mRNA expression. TBE PAGE of RT-PCR products shows Scn1a productive (bottom bands, 498 bp, indicated by *) and NMD-inducing transcript (upper bands, 562 bp, indicated by §) in mouse brains. Gapdh was used as loading control. Quantification of the Scn1a productive mRNA expression by qPCR is shown in FIG. 16G. M: DNA ladder, NEB, N3231L.

[0581] FIG. 20 shows expression of Na_{V}1.1 in mouse brains at different post-injection days. WT C57BL/6J mice were ICV injected with 10 μg of ASO-22 or PBS at P2. Na_{V}1.1 expression (˜223 kDa, indicated by *) was assessed by immunoblotting of two randomly selected brain samples from the 10-, 20-, and 30-day post-injection mice. 50 μg of total protein was loaded per lane. Ponceau S-stained blots are included to show equal loading. Quantification of changes in Na_{V}1.1 expression by Meso Scale Discovery (MSD) method is shown in FIG. 16H.

### Example 17: Treating Dravet Syndrome

[0582] Dravet syndrome (DS) is a rare infantile-onset drug-resistant developmental and epileptic encephalopathy with a poor long-term prognosis. Dravet syndrome affects an estimated 1:15,700 individuals in the United States, or a population of approximately 20,000 individuals (Wu et al., 2015, Pediatrics, 136:e1310-5, of which entire content is incorporated herein by reference). Dravet syndrome is most commonly characterized by a pathogenic mutation in the SCN1A gene (Scheffer 2012, Eur. J. Paediatr. Neurol. 16, Suppl 1: S5-8, of which entire content is incorporated herein by reference). Single nucleotide substitutions, small insertions or deletions, and even whole gene deletions have been reported, with at least 1257 different mutations in the SCN1A gene having been described in DS patients to date (Djémié et al., 2016, Mol Genet Genomic Med. 4:457-64, of which entire content is incorporated herein by reference). The SCN1A gene codes for the sodium voltage-gated channel alpha subunit (Na_{V}1.1 protein). SCN1A (Na_{V}1.1 channel) mutations associated with DS are mostly truncating or missense mutations that lead to loss-of-function of the Na_{V}1.1 protein in >95% of cases (Catterall et al., 2010, J. Physiol. 588:1849-59; Meng et al., 2015, Hum Mutat. 2015; 36:573-80, of which entire content is incorporated herein by reference). The mutations are heterozygous in DS patients and result in haploinsufficiency of the Na_{V}1.1 protein.

[0583] Several SCN1A mutations (Thr226Met, Val422Leu) have been identified in children with early infantile SCN1A encephalopathy, a profound developmental and epileptic encephalopathy that is phenotypically distinct from DS (Sadleir et al., 2017, Neurology, 89:1035-42, of which entire content is incorporated herein by reference). Upon functional biophysical testing using dynamic action potential clamp assessment, the mutations found to be causative for the early infantile disease have been demonstrated to cause gain-of-function changes in the Na_{V}1.1 protein (Berecki et al., 2019, Ann Neurol. 85:514-25, of which entire content is incorporated herein by reference). Several other mutations have been found using functional testing to cause gain-of-function changes in Na_{V}1.1 (V1611F, D1866Y, W1204R) that are also associated with a seizure phenotype that differs from DS (Meng et al., 2015, Hum Mutat. 2015; 36:573-80, of which entire content is incorporated herein by reference). In addition, Familial Hemiplegic Migraine (FHM), a disease not typically associated with epilepsy, has been shown in some cases to be associated with gain-of-function mutation in SCN1A (L263V, T1174S, Q1489K, F1499L, L1624P, L1649Q, L1670W) (Dhifallah et al., 2018, Front Mol. Neurosci. 11:232; Fan et al., 2016, Cephalalgia. 36:1238-47; Cestele et al., 2013, Proc. Natl. Acad. Sci. USA. 2013; 110:17546-51, of which entire content is incorporated herein by reference). Other potential gain-of-function SCN1A mutations have been associated with non-DS symptoms such as Rasmussen Syndrome (Arg1575Cys) (Depienne et al., 2009, J. Med Genet. 46:183-91, of which entire content is incorporated herein by reference).

[0584] Loss of Na_{V}1.1 channels in inhibitory interneurons may cause epilepsy and premature death in patients with DS (Cheah et al., 2012, PNAS. 109:14646-51, of which entire content is incorporated herein by reference). The loss of Na_{V}1.1 channels in other nerve cells likely contributes to the seizures, as well as other aspects of DS (Liu et al., 2013, Ann Neurol. 74:128-39, of which entire content is incorporated herein by reference). Dravet syndrome is characterized by multiple seizure types and frequently progresses to status epilepticus or prolonged seizures lasting more than 5 minutes that require immediate intervention. Almost all patients (>90%) suffer from several comorbidities in addition to seizures including motor and speech impairment, severe intellectual and developmental disabilities, learning difficulties, autism, Attention-Deficit/Hyperactivity Disorder, sleep and gait abnormalities, and behavioral difficulties (Lagae et al., 2018, Dev. Med. Child Neurol. 60:63-72, of which entire content is incorporated herein by reference). As a result, DS patients have a remarkably low quality of life (Lagae et al., 2018, Dev. Med. Child Neurol. 60:63-72, incorporated herein by reference).

[0585] Neurologic examination and cognition are usually normal in children with DS up to 2 years of age (Ragona et al., 2011, Epilepsia. 52:386-92, of which entire content is incorporated herein by reference). However, among DS patients >4 years of age, nearly 100% have intellectual impairment (Genton et al., 2011, Epilepsia. 52, Suppl 2:44-9; Ragona et al., 2011, Epilepsia. 52:386-92, of which entire content is incorporated herein by reference). The degree of neurobehavioral impairment ranges from minor learning difficulty to intellectual disability. The time period between 1 year and 8 years of age (the Worsening Stage) is a critical interval for intervention (FIG. 3). After 8 years of age, nearly 100% of DS patients have evidence of substantial intellectual disability (Gataullina and Dulac, 2017, Seizure 44:58-64, of which entire content is incorporated herein by reference). Cognitive impairment in DS is not purely a consequence of seizures. Patients with few seizures may have very severe encephalopathy, and conversely, patients with frequent seizures may have relatively little cognitive decline. In addition, there does not appear to be a correlation between cognitive outcome and SCN1A mutation type, whether a missense or truncating mutation (Ragona et al., 2011, Epilepsia. 52:386-92, incorporated herein by reference). Longer use of contra-indicated medications (e.g., sodium channel blockers) in the first 5 years of disease can have negative effects on cognitive outcome in people with DS (de Lange et al., 2018, Epilepsia, 59:1154-65, of which entire content is incorporated herein by reference).

[0586] Dravet syndrome is among the most drug-resistant forms of epilepsy, with more than 90% of patients continuing to have uncontrolled seizures despite treatment with multiple antiepileptic drugs (AEDs), putting them at high risk for injury or death. The primary goal of therapy for DS is to reduce seizure frequency and severity; however, there remains a significant need for additional therapies for these patients that address the other comorbidities of DS. Dravet syndrome is associated with low quality of life (Lagae et al., 2018, Dev. Med. Child. Neurol. 60:63-72, incorporated herein by reference). Reducing seizure frequency and improving cognition and gait will likely have a dramatic improvement in quality of life.

### Therapeutic Agent

[0587] An exemplary therapeutic agent for treating Dravet syndrome is an antisense oligonucleotide or antisense oligomer (ASO) medicine that targets ribonucleic acid (RNA) splicing to increase protein levels for the treatment of severe genetic diseases. Specifically, Compound-A is an embodiment of an ASO for the treatment of DS, which is characterized by mutations in the SCN1A gene. Dravet syndrome is most often characterized by mutations in one allele of the SCN1A gene. These patients possess one wild-type allele and one mutant allele. While the Na_{V}1.1 protein is produced from the wild-type allele, the mutant allele is translated into non-functional protein and results in 50% of the normal protein expression in the patient. Compound-A was designed to increase the level of productive SCN1A messenger RNA (mRNA) and consequently increase the expression of the sodium channel Na_{V}1.1 protein. That is, Compound-A binds to the SCN1A pre-mRNA and redirects the splicing machinery to decrease the amount of non-productive mRNA and increases productive mRNA, which is translated into increased Na_{V}1.1 protein from the wild-type allele. Restoring Na_{V}1.1 to physiological levels may reduce both the occurrence of seizures and other non-seizure comorbidities. This RNA-based approach may not be gene therapy, but rather RNA modulation, as it does not manipulate nor insert genetic deoxyribonucleic acid code.

[0588] Compound-A was developed to utilize TANGO (Targeted Augmentation of Nuclear Gene Output) technology to leverage a naturally occurring non-productive alternatively spliced exon in human and mouse SCN1A that leads to the incorporation of a premature termination codon and subsequent transcript (mRNA) degradation. These non-productive splicing events are a part of normal gene regulation, and the non-productive splicing events are part of the wild-type or normal sequence of the SCN1A gene. Non-productive splicing events amenable to TANGO are alternative splicing events that lead to nonsense-mediated mRNA decay exons, or NMD exons. NMD exons are found in over 10% of gene transcripts and, like retained introns, are part of the wild-type sequence of the gene. Non-productive mRNA, which includes these NMD exons, is degraded in the cytoplasm of the cell by nonsense-mediated mRNA decay and is not translated into protein. Compound-A binds to the pre-mRNA and redirects the splicing machinery to prevent inclusion of the NMD exon. This splice-switching decreases non-productive mRNA and increases productive mRNA, which is translated into increased full-length functional protein from the wild-type allele. The TANGO mechanism upregulates expression of the wild-type allele, meaning the TANGO mechanism does not rely on targeting a specific mutation. TANGO ASOs decrease the amount of non-productive mRNA and increase the level of productive mRNA, leading to the generation of more protein. TANGO operates in a mutation-independent manner, given it utilizes one wild-type allele, and does not alter protein coding splicing isoforms.

[0589] Scn1a mRNA and Na_{V}1.1 protein levels in rodent brains peak at 4 weeks after birth. In mice the rise in Na_{V}1.1 channels begins at 10 days postnatal and continues through 4 weeks of age (Cheah et al., 2013, Channels, 7:468-72, of which entire content is incorporated herein by reference). Human brain immunoblotting with subtype-specific antibodies showed that Na_{V}1.1 protein expression parallels that in rodent brain, with levels of Na_{V}1.1 being low at birth, steadily increasing to peak values by 20 months, and remaining steady through 30 months (Cheah et al., 2013, Channels, 7:468-72, incorporated herein by reference). A separate study in human brain showed Na_{V}1.1 immunoreactive neurons and neurites increased during the late fetal and postnatal periods, reached their peaks 7 to 9 months after birth (Wang et al., 2011, Brain Res. 1389:61-70, of which entire content is incorporated herein by reference). A similar pattern has been observed in non-human primates (NHPs) and humans. Although the absolute amount of NMD substrate is similar in brain tissues obtained from mice of different ages, because of the progressive increase in productive Scn1a mRNA and Na_{V}1.1 protein in the brain with age, the fold change in Scn1a and Na_{V}1.1 in Compound-A-treated mice is higher in younger animals than in older animals. Therefore, Compound-A treatment may be more effective in restoring Na_{V}1.1 protein back to physiologically normal levels in pediatric DS patients. Preclinical testing in a neonatal mouse model of DS using Compound-A showed significant mortality benefit in animals 35 to 90 days postnatally (equivalent to a greater than 2-year-old human) (Arzimanoglou et al., 2018, Pediatr. Drugs. 20:249-64, of which entire content is incorporated herein by reference).

[0590] Oligonucleotide-based compounds are developed for the treatment of human brain disorders by direct delivery inside the blood-brain barrier. Oligonucleotides dosed directly in the CNS have several unique pharmacokinetic (PK) and pharmacodynamic (PD) properties, including active uptake mechanisms, low systemic exposure, long half-lives (t_{1/2}), accumulation, and gradual release from subcellular depots (Khorkova and Wahlestedt, 2017, Nat. Biotechnol. 35:249-63, of which entire content is incorporated herein by reference). CNS delivery of ASOs, such as Compound-A, is not gene therapy (i.e., therapies delivered or expressed using viral technology). Compound-A is a synthetically manufactured chemical product which the FDA categorizes as a small molecule. Compound-A is chemically synthesized and may not be regarded as a biologic.

### Example 18: Pharmacological Evaluation of the Therapeutic Agent in Non-Human Models

[0591] Initial target engagement, pharmacology, and efficacy studies with Compound-A were performed in mice, including both wild-type and a DS mouse model. The targeted non-productive splicing event in SCN1A is highly conserved across multiple species, including mice, non-human primates (NHPs), and humans. The target sequence for Compound-A is also identical across species.

[0592] Characterization of target engagement and pharmacology of Compound-A was done in wild-type mice. Neonate (postnatal day one) mice were administered a single dose of Compound-A by intracerebroventricular injection. On Day 5 of life the brains were isolated and were processed for RNA and protein. Treatment with Compound-A resulted in a dose-dependent reduction of non-productive Scn1a mRNA. Furthermore, the reduction of non-productive mRNA was associated with an increase of productive Scn1a mRNA and an increase in Na_{V}1.1 protein.

[0593] Compound-A pharmacology and efficacy were also investigated in transgenic mice with a heterozygous deletion of Scn1a. This model was created by introducing a targeted deletion in the first coding exon of the Scn1a gene; these mice exhibit many aspects of the DS phenotype including seizures and premature lethality and has been previously used to evaluate new AEDs for DS. Neonate (postnatal day two) and wild-type littermate controls were administered a single dose of either placebo (consisting of a phosphate-buffered solution) or Compound-A by intracerebroventricular injection. A single injection of Compound-A restored Na_{V}1.1 protein in DS mice to levels that are near those of the wild-type mice at both 7 and 14 weeks. Compound-A treated samples showed an increase in expression of the SCN1A gene, but not any of the other SCN family members. These results demonstrate that Compound-A is highly specific for SCN1A among the highly homologous family of sodium channel genes, indicating a low likelihood of off-target activities. In addition to an increase in Na_{V}1.1 protein, the administration of a single dose of Compound-A in DS mice resulted in a significant reduction in premature mortality. Treatment with Compound-A resulted in 97% survival of DS mice for the 90-day postnatal observation period compared with 23% survival of placebo-treated mice. The 90-day post-natal mouse is equivalent to a greater than 2-year-old human (Arzimanoglou et al., 2018, Pediatr Drugs. 20:249-64, incorporated herein by reference).

[0594] In sum, preclinical data obtained with Compound-A demonstrate proof-of-mechanism and clinical efficacy for Compound-A. Compound-A engages the target and elicits the predicted pharmacology in wild-type mice brain. Administration of a single dose of Compound-A in DS mice resulted in a significant reduction (p<0.0001) in premature mortality.

[0595] The pharmacology, distribution, and tolerability of Compound-A were also evaluated in cynomolgus monkeys. Pre-pubescent monkeys were administered a single dose of Compound-A or control solution by intrathecal (IT) injection at a dose range that coincides with the estimated therapeutic dose range and stays below the maximum tolerated dose based on tolerability in monkeys and published data for molecules of similar chemistry. The animals (n=3 for treatment groups and n=2 for control groups) were sacrificed at 2 days or 28 days after dosing. A two-fold increase in the Na_{V}1.1 protein was observed. The increase in Na_{V}1.1 was also correlated with the presence of Compound-A in brain tissue.

### Example 19: Pharmacological Evaluation of Therapeutic Agent in Human Patients

[0596] DS is a highly drug-resistant form of genetic epilepsy, associated with multiple severe comorbidities. The Worsening Stage (between 1 and 8 years of age) is a critical window for therapeutic intervention to reduce the occurrence and severity of comorbidities such as intellectual disability. It is therefore crucial to develop novel therapeutics for the treatment of DS that may be administered to the pediatric population.

[0597] The safety and PK endpoints are, for example, the safety profile and PK of single or multiple doses of Compound-A. Safety variables for analysis include, but are not limited to, the incidence, type, and severity of AEs, vital signs, ECG/Holter, laboratory and physical examination parameters. The PK parameters may be obtained by non-compartmental analysis from plasma concentrations of Compound-A that may include, but are not limited to: Maximum plasma concentration (Cmax), Time to maximum plasma concentration (Tmax), Area under the plasma concentration-time curve from time 0 to infinity and to the last measurable concentration (AUC_{0-∞}, AUC₀₋ₜ), and Fold change in Cmax and AUC compared with dose levels. Exposure of Compound-A in CSF may be assessed by measuring concentrations of Compound-A.

[0598] The efficacy endpoints are, for example, evidence of dose effect and comparison between baseline and the end of treatment in: (i) percentage change from baseline in convulsive seizure frequency (as measured by paper diary) calculated over 4-week time periods; (ii) proportion of patients with >50%, >75%, and 100% reduction (compared with baseline) in convulsive seizure frequency (as measured by paper diary) calculated over 4-week time periods; (iii) change from baseline in overall clinical status as measured by the following scales: Caregiver Global Impression of Change (CaGIC), Clinical Global Impression of Change (CGIC), and Change from baseline in the patient's quality of life as measured by the EuroQol-5D (Youth) (EQ-5D-Y) instrument.

[0599] Other efficacy endpoints include, but are not limited to, number and type of all convulsive and non-convulsive seizures, percentage change from baseline in total seizure frequency (as measured by paper diary) calculated over, e.g., 4-week time periods, proportion of patients with ≥50%, ≥75%, and 100% reduction (compared with baseline) in total seizure frequency (as measured by paper diary) calculated over, e.g., 4-week time periods, change in 10-20 electroencephalogram (EEG) parameters, total sleep time measured by actigraphy and as weekly sleep duration (hours) by sleep diary, convulsive seizure frequency as measured by, e.g., the Embrace2 wearable device, assessment of ambulation and gait as measured by the Gillette Functional Assessment Questionnaire (FAQ) 22-item skill set, and analysis of CSF, plasma, or serum samples for exploratory biomarkers (e.g., Na_{V}1.1, neurofilament light chain, etc.).

### Dose Levels

[0600] Single or multiple doses of Compound-A, e.g., 0.1, 0.5, 1, 2.5, 5, 6, 7, 8, 9, 10, 11, 12, 13, 14, 15, 16, 17, 18, 19, 20, 25, 30, 35, 40, 45, 50, 55, 60, 65, 70, 75, 80, 85, 90, 95, 100, 105, 110, 115, 120, 125, 130, 135, 140, 145, 150, 155, 160, 165, 170, 175, 180, 185, 190, 195, or 200 mg, is administered by intrathecal (IT) injection to patients with DS. The dose levels may be adjusted based on Safety Monitoring Committee (SMC) determination. Dose escalation between cohorts may be two-fold or lower increase for each dose level.

### Patient Population

[0601] Patients meeting the following criteria (Inclusion Criteria) may be eligible: (i) patient and/or authorized representative must be willing and able to give informed consent/assent and any authorizations required by local law for participation in the study; (ii) patient and their caregiver must be willing and able to comply with all protocol requirements; (iii) patient must be up to 18 years (inclusive) of age at Screening; (iv) patient must have DS as defined by: (a) onset prior to 12 months of age with recurrent focal motor or hemiconvulsive or generalized tonic-clonic seizures, which are often prolonged and triggered by hyperthermia, (b) no past history of causal magnetic resonance imaging (MRI) lesion (MRI not required to confirm absence of lesion), (c) no other known etiology, and (d) normal development at seizure onset; (v) patient must have a documented pathogenic, likely pathogenic variant, or variant of uncertain significance in the SCN1A gene associated with DS. Patients who have SCN1A testing results of negative (no variants of clinical significance identified) may not be enrolled; (vi) patient has had at least 2 prior treatments for epilepsy that either had lack of adequate seizure control (requiring an additional AED) or had to be discontinued due to an AE(s); (vii) patient must be experiencing 4 or more convulsive seizures (Hemiclonic, Focal with Motor Signs, Focal to Bilateral Tonic Clonic Convulsion, Generalized Tonic Clonic Convulsion, Tonic, Tonic/Atonic (Drop Attacks), and Clonic) during the initial Observation Period; (viii) patient must currently be taking at least one AED at a dose which has been stable for at least 4 weeks prior to Screening; (ix) all epilepsy medications or interventions for epilepsy (including ketogenic diet or vagal nerve stimulator) must have been stable (including product type, dose, and setting) for at least 4 weeks prior to Screening; (x) any marijuana- or cannabinoid-based product or medication is allowed but treatment must have been stable for at least 4 weeks prior to Screening, including supplier, ratio, and dose; and (xi) patient must meet age-appropriate institutional guidelines for IT drug administration procedures.

[0602] Patients meeting the following criteria (Exclusion Criteria) may not be eligible: (i) patient has one of the following mutations in the SCN1A gene: Thr226Met, Leu263Val, Val422Leu, Thr1174Ser, Trp1204Arg, Pro1345Ser, Gln1489Lys, Phe1499Leu, Arg1575Cys, Val1611Phe, Leu1624Pro, Arg1648Cys, Leu1649Gln, Leu1670Trp, Gly1674Arg, or Asp1866Tyr; (ii) patient has a known pathogenic mutation in another gene that causes epilepsy (the pathogenic mutation must be homozygous in cases of known recessive disease); (iii) patient is currently being treated with a sodium channel blocker as maintenance treatment including: phenytoin, carbamazepine, oxcarbazepine, lamotrigine, lacosamide, or rufinamide; (iv) patient has clinically significant unstable medical conditions other than epilepsy; (v) patient has had clinically relevant symptoms or a clinically significant illness in the 4 weeks prior to Screening or prior to dosing on Day 1, other than epilepsy; (vi) patient has a history of brain or spinal cord disease (other than epilepsy or DS) or a history of bacterial meningitis or brain malformation; (vii) patient has a spinal deformity or other condition that may alter the free flow of CSF or has an implanted CSF drainage shunt; (viii) patient has clinically significant (in the judgment of the Investigator) abnormal laboratory values at Screening or prior to dosing on Day 1; (ix) patient has AST or ALT >2.5-fold ULN, serum creatinine >ULN, or platelet count <the lower limit of normal at Screening and upon repeat testing; (x) patient has clinically relevant abnormalities in the 12-lead ECG measured at Screening or prior to dosing on Day 1; (xi) patient has a psychiatric or behavioral disorder which, in the opinion of the Investigator, may interfere with the patient's participation in the study; (xii) patient is currently taking, or in the past 4 weeks has taken, any anticoagulant (except aspirin); (xiii) female patients of childbearing potential and male patients whose partner is of childbearing potential, unless willing to ensure that they or their partner use effective contraception, for example, abstinence, oral contraception, double barrier, or intra-uterine device during the study and for 3 months thereafter; (xiv) patient who is pregnant, lactating, or planning pregnancy during the course of the study and for 3 months thereafter following the last dose of Compound-A; (xv) Patient who is currently enrolled in or has been part of a blinded clinical study involving an investigational product within 2 months prior to Screening; and (xvi) Patient has any other significant disease or disorder which, in the opinion of the Investigator, may either put the patient at risk because of participation in the study, may influence the results of the study, or may affect the patient's ability to participate in the study.

[0603] The mechanism of action of Compound-A may cause an increase in the levels of the gain-of-function mutated protein and treatment may lead to a worsening of symptoms. Patients carrying gain-of-function mutations in SCN1A may likely be excluded from the study because they do not meet the criteria for DS diagnosis.

### Administration of Therapeutic Agents

[0604] The drug product is a concentrate intended for dilution with artificial cerebral spinal fluid (aCSF) solution followed by intrathecal administration. The diluent, aCSF, for administration is supplied with the drug product. The drug product may be produced with sufficient fill volume to allow withdrawal of, e.g., 5.0 mL. The solution is a clear, colorless liquid that is essentially free of visible particles. Instructions regarding drug storage, preparation and dosing may be included.

[0605] Mode of Administration: diluted drug product may be administered as an IT slow bolus.

[0606] An exemplary drug product is provided in a kit comprised of 3 vials: 1 vial of drug product at an appropriate concentration; 1 vial of aCSF diluent; and 1 empty, sterile vial for mixing. It is suitably packaged in such a way as to protect the product from deterioration during transport and it is stored frozen at, e.g., −20° C. at the study site. Further information regarding storage and transport conditions may be provided. The study drug may be shipped on dry ice and stored on site at, e.g., −20° C.

[0607] In addition to the therapeutic agents as described herein, for example, Compound-A, patients may take at least one AED during the study, and any AEDs the patient takes may be maintained at a stable dose prior to Screening and after dosing. For some examples, patients may take at least one AED during the study, and any AEDs the patient takes may be maintained at a stable dose for at least, e.g., 4 weeks prior to Screening and for the first, e.g., 12 weeks after dosing, in addition to the therapeutic agents as described herein, for example, Compound-A. Exemplary medications or interventions for epilepsy include, but are not limited to, ketogenic diet, vagal nerve stimulator, cannabinoid or marijuana-derived products. Exemplary rescue medications allowed for home use include, but are not limited to, lorazepam, midazolam, and diazepam. Lorazepam may be used at 0.1-0.2 mg/kg as needed (PRN) intrabuccally, sublingually, or intravenously. Midazolam may be used at 0.1-0.2 mg/kg PRN intranasally, intrabuccally, or intravenously. Diazepam may be used at 0.2-0.5 mg/kg PRN rectally or intravenously.

[0608] The exemplary medications that may not be concomitantly used with the therapeutic agents as described herein, for example, Compound-A, include, but are not limited to, sodium channel blockers as maintenance treatment (e.g., phenytoin, carbamazepine, oxcarbazepine, lamotrigine, lacosamide, or rufinamide), anticoagulants (except aspirin), and any investigational product or device.

### Study Assessments

### Epilepsy Genetic Panel Testing:

[0609] Saliva samples are collected at Screening for determination of the patient's DS mutation and confirmation of eligibility. The samples are analyzed using a genetic epilepsy panel. The panel also analyzes genes associated with both syndromic and nonsyndromic causes of epilepsy (including SCN1A) and provides a comprehensive analysis for inherited epilepsy.

### Baseline Assessments:

[0610] Exemplary patient demographic and baseline characteristic data to be collected on all patients include, but are not limited to, age at Screening, sex, race/ethnicity, age of DS disease onset, and diagnostic and treatment history for DS.

### Example 20: Targeted Augmentation of Nuclear Gene Output (TANGO) of SCN1A Reduces Seizures and Rescues Parvalbumin Positive Interneuron Firing Frequency in a Mouse Model of Dravet Syndrome

[0611] Dravet syndrome (DS) is a severe and progressive developmental and epileptic encephalopathy characterized by high seizure frequency and severity, intellectual disability, and a high risk of sudden unexpected death in epilepsy (SUDEP). Approximately 85% of DS cases are characterized by spontaneous, heterozygous loss of function mutations in the SCN1A gene which encodes the voltage-gated sodium channel a subunit Na_{V}1.1. A novel therapeutic approach was developed to treat DS using antisense oligomers (ASOs) to increase the endogenous expression of Scn1a mRNA and Na_{V}1.1 protein. This approach was tested using the F2:129S-Scn1a^{+/-}×C57BL/6J DS mouse model that has been shown previously to recapitulate many patient phenotypes.

### Methods

[0612] Targeted Augmentation of Nuclear Gene Output (TANGO), which modulates naturally occurring, non-productive splicing events to increase target protein expression, was used to screen and identify an ASO (Compound-A) that can increase productive Scn1a mRNA and Na_{V}1.1 protein in vivo. 20 μg TANGO ASO or PBS control was administered to DS mice and wildtype (WT) littermates by single intracerebroventricular (ICV) injection at postnatal day (P)2. Mice were monitored by electroencephalography (EEG) pre (P13-19) and post (P20-40) weaning. DS mice were also crossed with WT mice hemizygous for a parvalbumin (PV)-tdTomato fluorescent reporter to produce DS mice expressing the tdTomato specifically in PV expressing interneurons. These mice received 20 μg ASO or PBS by ICV administration at P2 and then electrophysiological recordings were taken from tdTomato expressing cells in the somatosensory cortex between P17 and 23.

### Results

[0613] No seizures were detected in any of the mice prior to day 16. Between P16-19, ASO-injected DS mice continued seizure free (0/5 animals) whereas 50% (4/8 animals) of PBS-injected control DS mice had seizures. When assessed after weaning (P20-40), 2/11 P2 ASO injected DS mice developed seizures and one animal died while 9/11 P2 PBS-injected control DS mice developed seizures and seven animals died. The firing frequency of PV interneurons in DS mice assessed between P17 to P23 was significantly impaired. DS PV interneurons fired at a significantly (P<0.05) lower frequency than WT PV interneurons over a range of current injection steps. After ASO treatment at P2, the firing frequency of PV interneurons in DS mice was increased and was no longer significantly different from WT levels.

### CONCLUSIONS

[0614] These results provide evidence that increased Scn1a and Na_{V}1.1 expression achieved using a TANGO ASO can greatly decrease seizures and death rates in a mouse model of SCN1A-linked DS. Further, the current data support the hypothesis that the improvement in DS phenotype is in part due to restoration of excitability of PV expressing interneurons.

### Example 21: Targeted Augmentation of Nuclear Gene Output (TANGO) of SCN1A Reduces Seizures and Rescues Parvalbumin Positive Interneuron Firing Frequency in a Mouse Model of Dravet Syndrome

[0615] Dravet syndrome (DS) is a severe developmental and epileptic encephalopathy. DS is caused primarily by physiologically loss-of-function SCN1A mutations resulting in hypofunction of inhibitory interneurons. Patients suffer refractory seizures, cognitive and motor impairments, and have a substantial risk for SUDEP. There is a demand for therapeutic strategies that directly address genetic cause of disease.

[0616] Compound-A reduced seizure frequency and extended survival in DS mice with no significant deleterious effects observed in WT mice. Treatment with Compound-A rescues neuronal excitability of parvalbumin-positive inhibitory interneurons in DS mice, which supports the hypothesis that restoration of excitability to inhibitory interneurons is a viable approach toward rescuing DS mice from seizures and death.

[0617] Potential future evaluations: collect electrophysiology recordings of voltage-gated sodium channel activity; explore effects on other inhibitory interneuron populations (SST, VIP, etc.); examine impact on network excitability (synaptic inhibition, etc.).

### Example 22: Safety and Pharmacokinetics of Antisense Oligonucleotide Compound-A in Children and Adolescents with Dravet Syndrome: Single Ascending Dose Design for the Open-Label Phase 1/2a MONARCH and ADMIRAL Clinical Studies

[0618] Condition or disease: Dravet Syndrome.
[0619] Intervention/treatment: Drug: Compound-A
[0620] Phase: Phase 1, Phase 2
[0621] Ages Eligible for Study: 2 Years to 18 Years (Child, Adult);
[0622] Sexes Eligible for Study: All;
[0623] Accepts Healthy Volunteers: No

### Rationale

[0624] Dravet syndrome (DS) is a severe and progressive genetic epilepsy characterized by frequent, prolonged, and refractory seizures, beginning within the first year of life. It is characterized by high seizure frequency and severity, intellectual disability, and a high risk of sudden unexpected death in epilepsy. Available therapies do not adequately control seizures in 90% of DS patients, and they do not address other aspects of the disease, including intellectual disability, developmental delays, motor and speech impairment, behavioral problems, sleep abnormalities, and an increased risk of sudden unexpected death in epilepsy. Complications of the disease often contribute to a poor quality of life for patients and their caregivers. In approximately 85% of cases, DS is characterized by spontaneous, heterozygous loss of function mutations in the SCN1A gene, which encodes the voltage-gated sodium channel type 1α subunit (Na_{V}1.1). Upregulating Na_{V}1.1 may restore functioning neurons and prevent seizures and reduce non-seizure related comorbidities in DS.

[0625] Compound-A is an investigational new medicine for the treatment of Dravet syndrome. Compound-A is an antisense oligonucleotide treatment using a unique platform, Targeted Augmentation of Nuclear Gene Output (TANGO) (FIG. 24) that exploits naturally occurring nonproductive splicing events to increase Na_{V}1.1 protein expression. Compound-A is an antisense oligonucleotide (ASO) that is intended to increase the level of productive SCN1A messenger RNA (mRNA) and consequently increase the expression of the sodium channel Na_{V}1.1 protein. This RNA-based approach is not gene therapy, but rather RNA modulation, as it does not manipulate nor insert genetic deoxyribonucleic acid (DNA). Compound-A is designed to upregulate Na_{V}1.1 protein expression from the nonmutant (wild-type) copy of the SCN1A gene to restore physiological Na_{V}1.1 levels. Na_{V}1.1 levels are reduced in people with Dravet syndrome. Stoke has generated preclinical data demonstrating proof-of-mechanism for Compound-A, which is also used interchangeably with “ASO-1.”

[0626] In DS, patients have one functional gene copy (orange) and one mutated copy (red), resulting in half as much protein as needed to maintain health. These genes are transcribed into pre-messenger RNA (pre-mRNA); most pre-mRNA is productive, becoming a template for protein production, but some is non-productive pre-mRNA. Synthesized ASOs (green) bind to specific stretches of pre-mRNA, reducing the synthesis of non-productive mRNA and increasing the synthesis of productive mRNA. The increased levels of productive mRNA from the functional gene copy increase protein production, thereby restoring the target protein to near normal levels.

[0627] Current treatments focus on seizure control. Compound-A may be the first precision medicine approach for DS. Compound-A has the potential to be the first disease-modifying therapy to address the genetic cause of DS by restoring physiological Na_{V}1.1 levels and reducing both occurrence of seizures and significant non-seizure comorbidities. This clinical study aims to primarily assess the safety, tolerability and pharmacokinetics of intrathecally administered Compound-A. Secondary objectives aim to evaluate the effect of Compound-A on convulsive seizure frequency, overall clinical status and quality of life in Dravet syndrome patients. The dose implications of this study may better inform future clinical trials on the appropriate and effective dosing for efficacy measures.

### Study Design:

[0628] Open-label, Single and Multiple Ascending Doses (SAD and MAD) of Compound-A in 2-18 y.
[0629] Study duration: 7-9 months/patient; Number of patients <80;
[0630] Sites: US; UK, Scotland, Ireland among others;
[0631] Cohorts: This phase 1/2a open-label single ascending dose study includes patients aged 2-18 years with disease onset prior to 12 months of age with recurrent seizures (focal motor, hemiconvulsive or generalized tonic-clonic) and genetically confirmed SCN1A variant.
[0632] Inclusion Criteria: Must have DS with onset prior to 12 months of age with recurrent focal motor or hemiconvulsive or generalized tonic-clonic seizures, which are often prolonged and triggered by hyperthermia; No history of causal MRI lesion; No other known etiology; Normal development at seizure onset; Documented pathogenic, likely pathogenic variant, or variant of uncertain significance in the SCN1A gene associated with DS; Had at least 2 treatments for epilepsy that either had lack of adequate seizure control (requiring an additional AED) or had to be discontinued due to an AE(s); Currently be taking at least one AED at a dose which has been stable for at least 4 weeks prior to Screening; All epilepsy medications or interventions for epilepsy (including ketogenic diet or vagal nerve stimulator) must have been stable (including product type, dose, and setting) for at least 4 weeks prior to Screening.
[0633] Exclusion Criteria: Known pathogenic mutation in another gene that causes epilepsy; Currently being treated with an antiepileptic drug acting primarily as a sodium channel blocker including: phenytoin, carbamazepine, oxcarbazepine, lamotrigine, lacosamide, or rufinamide; Clinically significant unstable medical conditions other than epilepsy; Has had clinically relevant symptoms or a clinically significant illness in the 4 weeks prior to Screening or prior to dosing on Day 1, other than epilepsy; Any other significant disease or disorder which, in the opinion of the Investigator, may either put the patient at risk because of participation in the study, may influence the results of the study, or may affect the patient's ability to participate in the study.
[0634] Dosing: Dose escalation based on safety and tolerability assessed by Safety Committee (with external reviewers), Dosing begins in 13 to 18 y cohorts, with internal safety team approving dosing in 2 to 12 y.

### A. MONARCH and ADMIRAL Studies: Single Ascending Dose Arm

[0635] Enrollment of patients in two age groups. A Sentinel group of patients aged 13 to 18 years of age, inclusive, and an expanded group of patients 2 to 12 years of age were to receive single doses. There was an option to dose up to 6 additional patients at each dose level and an option to expand the maximum tolerated dose level with 5 additional patients. In Single Ascending Doses arm (SAD), ASO-1 drug product is an antisense oligonucleotide administered as an intrathecal injection. Four dose levels were evaluated (10 mg, 20 mg, 30 mg, 45 mg and 70 mg). In the MONARCH study, SAD regimes at 10, 20, 30 mg and 45 mg dosages were administered to an expanded group of patients 2 to 12 years of age and 13-18 years of age. In the ADMIRAL study, SAD regimes at 30, 45, and 70 mg were administered to an expanded group of patients 2 to 12 years of age and 13-18 years of age. Dose escalation was based on safety and tolerability assessment by the Safety Monitoring Committee (including external reviewers). Dosing began in each cohort in 13- to 18-year-olds and an internal safety team approved dosing in younger patients (2-12 years).

### B. MONARCH Study: Multiple Ascending Doses Arm

[0636] Enrollment of patients in two age groups. A Sentinel group of 2 patients aged 13 to 18 years of age, inclusive, and an expanded group of 2 patients 2 to 12 years of age to receive multiple doses. There will be an option to dose up to 6 additional patients at each dose level and an option to expand the maximum tolerated dose level with 10 additional patients. In the Multiple Ascending Doses (MAD) arm, ASO-1 drug product is an antisense oligonucleotide administered as an intrathecal injection. Three dose levels will be evaluated (20 mg, 30 mg and 45 mg). In the MONARCH study, MAD regimes at 20, 30 mg and 45 mg dosages were administered to an expanded group of patients 2 to 12 years of age and 13-18 years of age.

[0637] FIGS. 33A-C shows the study design for the Phase1/2a clinical trials for ASO-1. FIG. 33A shows the study design and dosing schedule using the Single Ascending Dose (SAD) regime (MONARCH) before patients can become eligible to enroll in the LONGWING OLE. FIG. 33B shows the study design and dosing schedule using the Multiple Ascending Dose regime (MONARCH) before patients can become eligible to enroll in the LONGWING OLE. FIG. 33C shows the study design and dosing schedule using the Multiple Ascending Dose regime (ADMIRAL) before patients can become eligible to enroll in the LONGWING OLE. Study protocol for ADMIRAL was amended to allow investigators to decide whether to administer two or three doses of ASO-1 (70 mg) in the ADMIRAL study before patients would be eligible to enroll in the LONGWING OLE.

[0638] FIGS. 33A-C shows the workflow of the SAD and MAD study assessments in the MONARCH and ADMIRAL studies. Basically, for each patient in the study, there was a baseline period for monitoring seizure from Day −28 and Day −1 (in reference to 1^{st} dose of study drug), and the patient was monitored continuously (adverse effect monitoring, physical examination, clinical laboratories, and plasma PK) for 225 days post administration in the SAD and MAD arms of the MONARCH study and 252 days in the SAD arm of the ADMIRAL study. Study drug, Compound-A was administered on Day 1 in SAD arm of the MONARCH study. Compound A was administered on Day 1, Day 29, and Day 57 in MAD arm of the MONARCH study. Compound A was administered on Day 1, Day 57, and Day 85 in SAD arm of the ADMIRAL study. Baseline seizure diary was collected in the periods of Day −28 to Day −1, Day 1 to Day 28, Day 29 to Day 56, Day 57-Day 84, Day 85-Day 112, Day 113 to Day 140, Day 141 to Day 168, Day 169 to Day 196, Day 197 to Day 224 in the MONARCH Study. Baseline seizure diary was collected in the periods of Day −28 to Day −1, Day 1 to Day 28, Day 29 to Day 56, Day 57 to Day 84, Day 85 to Day 112, Day 113 to Day 140, Day 141 to Day 168, Day 169 to Day 196, Day 197 to Day 224, and Day 225 to Day 252 in the ADMIRAL Study.

[0639] Study visits include the following (FIG. 26): screening visit; a 4-week observation period: no change to current anti-epileptic therapy, ketogenic diet, or vagal nerve stimulator settings, caregivers track child's seizure frequency during this period; Baseline visit: blood and urine analyses, Quality of Life, neurological, and general pediatric assessments; Inpatient treatment period: patients are admitted on the day of dosing and discharged after completing post-dose assessments: all patients will receive intrathecal administration of Compound-A; 3 month and 6-month follow-up period. Patients who complete the study will have the option to receive Compound-A in an open-label extension study if they meet enrollment criteria.

[0640] Two cohorts based on age (2-12 and 13-18 years) will be administered a single dose or multiple doses of Compound-A intrathecally (IT). Each cohort will enroll up to 4 patients with an option to dose up to 6 additional patients per cohort at the same level based on clinical assessment for safety evaluation. All patients will have a 28-day observation period evaluating seizure frequency. On Day 1, patients undergo cerebral spinal fluid (CSF) collection followed by a single IT administration of Compound-A and 24-hour post-dose assessment. There will be a 1-year follow-up period after dosing. Adverse events are monitored throughout the study. Plasma and CSF will be collected at multiple timepoints. Patients will also keep a seizure/sleep diary the full duration of the study. The demographics for the 74 patients treated with >=1 dose of ASO-1 in the MONARCH and ADMIRAL studies are shown in Table 11. Enrolled patients have severe disease and are refractory to Standard treatment.

### C. Outcome Measures:

### Primary Outcome Measures:

[0641] 1. Incidence proportion of adverse events [Time Frame: Screening until 6 months after single drug dosing Safety of Compound-A will be evaluated by the proportion of subjects experiencing Adverse Events, Serious Adverse Events, and Adverse Events leading to drug discontinuation.
[0642] 2. Pharmacokinetic (PK) Parameters [Time Frame: Screening until 6 months after single drug dosing] Analysis of plasma concentrations of Compound-A
[0643] 3. Exposure of Compound-A in Cerebrospinal Fluid (CSF) [Time Frame: Screening until 6 months after single drug dosing] Measurement of Compound-A concentrations

### Secondary Outcome Measures:

[0644] 1. Measurement of seizure frequency [Time Frame: Screening until 6 months after single drug dosing] Measured by paper diary
[0645] 2. Change in clinical status [Time Frame: Screening until 6 months after single drug dosing] Change from baseline in overall clinical status as measured by the Caregiver Global Impression of Change (CaGIC).
[0646] Values of scales: a. Very much improved; b. Much improved; c. Minimally improved; d. No change; e. Minimally worse; f. Much worse; g. Very much worse
[0647] 3. Change in clinical status [Time Frame: Screening until 7 months after single drug dosing] Change from baseline in overall clinical status as measured by the Clinical Global Impression of Change (CGIC)
[0648] Values of scales: a. Very much improved; b. Much improved; c. Minimally improved; d. No change; e. Minimally worse; f. Much worse; g. Very much worse
[0649] 4. Measurement of Quality of Life [Time Frame: Screening until 6 months after single drug dosing] Change from baseline in the patient health is measured by the EuroQOL quality of life questionnaire, youth version (EQ-5D-Y) instrument. The scale is scored from 0-100. The reference to a high score indicates a better outcome of quality of life.

### Results

[0650] This study will provide insight into the safety, tolerability, and pharmacokinetic profile of ascending doses of Compound-A in DS patients. In addition, the impact of Compound-A on frequency of convulsive seizures and quality of life may indicate the initial clinical effect of the individual doses.

### Example 23: Interim Safety, PK, CSF Exposure, and Seizure Frequency Data from a Phase 1/2a Study of Compound-A in Children and Adolescents with Dravet Syndrome (DS)

[0651] This example describes some interim data obtained from a Phase 1/2a study of Compound-A in children and adolescents with DS. The data presented here illustrate the safety, pharmacokinetic, and cerebrospinal fluid (CSF) exposure features of Compound-A in the tested subjects and their seizure frequency before and after administration of Compound-A. Patients in this study have severe disease. The interim data presented here show that single doses of Compound-A up to 30 mg and multiple doses of 20 mg were well-tolerated, and there were no safety concerns related to study drug. Moreover, dose-dependent increases in plasma exposure and CSF concentration were observed, and it was found that seizures were reduced in 12 of 17 (70.6%), including all 2- to 12-year-old patients, at days 29-84 as compared to baseline period.

[0652] FIG. 29 shows the workflow of the SAD and MAD study assessments. Basically, for each patient in the study, there was a baseline period for monitoring seizure from Day −28 and Day −1 (in reference to 1^{st} dose of study drug), and the patient was monitored continuously (adverse effect monitoring, physical examination, clinical laboratories, and plasma PK) for 169 days post administration in SAD study, and 225 days in MAD study. Study drug, Compound-A was administered on Day 1 in SAD study, was administered on Day 1, Day 29, and Day 57 in MAD study. Baseline seizure diary was collected in the periods of Day −28 to Day −1, Day 1 to Day 85, and Day 141 to Day 169 in SAD study, and in the periods of Day −28 to Day −1, and Day 1 to Day 225 in MAD study. CSF collection was performed on Day 1, Day 85, and Day 169 in SAD study, and on Day 1, Day 29/Week 4, Day 57/Week 8, and Day 141/Week 20 in MAD study.

[0653] Cutoff date for data presented in this example was Oct. 19, 2021, after all patients in Cohort A3 (30 mg SAD) completed visit 5 (day 85) and Cohort B1 (20 mg MAD) completed visit 7 (week 12). All received ≥1 dose of Compound-A.

[0654] Study Object. Primary Assessments include Safety and Tolerability (Adverse events (AEs), vital signs, physical examination, electrocardiogram, laboratories), Pharmacokinetics (PK) (Compound-A plasma concentrations), and Cerebrospinal Fluid (CSF) Exposure (Compound-A CSF concentrations). Secondary Assessments include Convulsive seizure frequency (Daily paper seizure diary), Overall Clinical Status and Quality of Life (Caregiver and Clinical Global Impression of Change; EQ-5D-Y).

[0655] Table 9 below summarizes the demographics of the tested subjects and the safety evaluation after they received administration of Compound-A. The most common treatment-emergent adverse effects (TEAEs) include headache (reported in 7 patients), vomiting (6 patients), seizure (5 patients), irritability (4 patients), back pain (3 patients), fall (3 patients), and pyrexia (3 patients). In addition, overall, there was no new clinically significant weakness reported on physical exam, there was no increase in seizures identified in 1 hour EEG recorded ˜24 hours post-dose, and there were no clinically significant changes in laboratories assessed as related to study drug.

TABLE 9
Summary of Demographics and Safety

| SAD | | | MAD | |
|---|---|---|---|---|
| A1 (10 | A2 (20 | A3 (30 | B1 (20 | |
| mg) | mg) | mg) | mg) | Total |

Age at Screening, y

| | | | | | |
|---|---|---|---|---|---|
| n | 5 | 4 | 7 | 6 | 22 |
| Mean (SD) | 11.2 | 10.8 | 9.1 | 13.7 | 11.1 |
| | (5.89) | (5.19) | (5.90) | (5.13) | (5.46) |
| Median (min, max) | 13.0 | 10.0 | 10.0 | 16.0 | 13.0 |
| | (2, 18) | (6, 17) | (2, 16) | (4, 17) | (2, 18) |

Age Group, n (%)

| | | | | | |
|---|---|---|---|---|---|
| 2-12 y | 2 (40) | 2 (50) | 4 (57.1) | 2 (33.3) | 10 (45.5) |
| 13-18 y | 3 (60) | 2 (50) | 3 (42.9) | 4 (66.7) | 12 (54.5) |

# patients (all ages) with TEAEs (treatment-emergent adverse effects)

| | | | | | |
|---|---|---|---|---|---|
| TEAEs, n(%) | 4 (80.0) | 4 (100.0) | 7 (100.0) | 6 (100.0) | 21 (95.5) |
| TEAEs, related to study drug, n (%) | 2 (40.0) | 1 (25.0) | 0 | 1 (16.7) | 4 (18.2) |
| >=Grade 3 TEAEs, n (%) | 0 | 1 (25.0) | 1 (14.3) | 1 (16.7) | 3 (13.6) |
| >=Grade 3 TEAEs, related to study | 0 | 0 | 0 | 0 | 0 |
| drug, n (%) | | | | | |
| Serious TEAEs, n (%) | 1 (20.0) | 1 (25.0) | 1 (14.3) | 2 (33.3) | 5 (22.7) |
| Serious TEAEs, related to study | 0 | 0 | 0 | 0 | 0 |
| drug, n (%) | | | | | |
| TEAEs leading to study withdrawal | 0 | 0 | 0 | 0 | 0 |
| or death, n (%) | | | | | |

[0656] Table 10 below summarizes the pharmacokinetic results in each cohort, and FIG. 30 shows two plots summarizing CSF exposure of Compound-A in SAD cohorts and MAD cohorts, respectively. Dose-dependent increases in plasma exposure and CSF concentration were observed. Plasma AUCₗₐₛₜ was similar for the 20 mg SAD cohort and 1^{st} dose in the 20 mg MAD cohort. Last collection until which Compound-A CSF levels were detected was on day 169 for 10 and 20 mg, and day 85 for 30 mg. Overall, mean CSF concentration at day 85 increased from 10 to 30 mg. Mean CSF levels post 2^{nd} dose were higher compared to levels post 1^{st} dose indicating accumulation of Compound-A in CNS tissues with repeated monthly dosing.

TABLE 10
Plasma PK parameters of Compound A

| | Plasma PK parameters | |
|---|---|---|
| | | AUCₗₐₛₜ (h*ng/ml) |
| Dose (mg) | N | (mean ± SD) |
| SAD 10 | 4 | 2450 ± 1690 |
| SAD 20 | 4 | 6460 ± 2820 |
| SAD 30 | 7 | 15300 ± 12100 |
| MAD 20 (dose 1) | 6 | 4450 ± 3110 |

[0657] Observed baseline convulsive seizure frequency over a period of 28 days in the tested subjects was calculated, with a Mean (SD) of 51.41 (131.4), and Median (min, max) of 16 (1.0, 630.0). 90.9% patients used at least three concomitant anti-seizure medications as maintenance therapy, and 72.7% used at least four concomitant anti-seizure medications as maintenance therapy. Most common medications were clobazam (68.2%) and fenfluramine (54.5%).

[0658] FIGS. 31A-31B show two plots summarizing mean percent change in seizure frequency from baseline level to the period between Day 29 and 84 post administration of Compound-A (in reference to 1^{st} dose, Day 29-84) in 2- to 12-year-old subjects (FIG. 31A) and 13- to 18-year-old (FIG. 31B), all combined by cohort. In 2- to 12-year-old subjects in all cohorts, there was a reduction in seizure frequency as measured: about 20% in Cohort A2 (20 mg, N=2), about 35% in both Cohort A3 (30 mg; N=2) and Cohort B1 (20 mg MAD, N=2), and about 70% in Cohort A1 (10 mg; N=1). In 13-18 y subjects, there was about 25% reduction in seizure frequency in Cohort B1 (20 mg MAD, N=2), and about 35% in Cohort A3 (30 mg; N=3). Note that when analyzing the seizure frequency data, Cohort A1 excludes patient with incorrect dosing, Cohort A3 excludes patients meeting minimum seizure count during observation but not during defined baseline; and Cohort B1 excludes patients who received only 2 doses prior to D84. Overall, seizures were reduced in 12 of 17 (70.6%), including all 2- to 12-year-old patients, at days 29-84 vs baseline period.

[0659] FIGS. 32A-32B show two plots summarizing mean percent change in seizure frequency from baseline in patients of all ages as combined by cohort in the period between Day 1 and Day 84 (Day 1-84) post administration (FIG. 32A), and in the period between Day 29-84 (Day 29-84) post administration (FIG. 32B).

### Example 24: Interim Safety, PK, CSF Exposure, and Seizure Frequency Data from a Phase 1/2a Study of Compound-A in Children and Adolescents with Dravet Syndrome (DS)

[0660] FIGS. 33A-C provide the study design for the Phase1/2a clinical trials for ASO-1. FIG. 34 shows a plot summarizing mean percent change in seizure frequency from baseline in patients of all ages receiving 30 mg, 45 mg of ASO-1, and combined by cohort in the period between Day 1 and Day 225 post administration in the MONARCH study (and in the period between Day 1 and Day 252 post administration in the ADMIRAL study). Overall, there was an observable beneficial effect of ASO-1 on convulsive Seizure Frequency in the 30 mg, 45 mg, and 70 mg Multiple Dose Cohorts (FIG. 34), with an average reduction of about 50%-60% (at the Day 225 period) in patients receiving the 45 mg dose, an average reduction of about 30% in patients receiving the 30 mg dose (at the Day 169 mark), and an average reduction of about 90% in patients receiving the 70 mg dose (at the end of the Day 252 mark). When measured through the period of Day 29 to 3-months post last dose administration, there was an average reduction of about 42% in patients receiving the 70 mg dose, an average reduction of about 30% in patients receiving the 45 mg dose, and an average reduction of about 18% in patients receiving the 30 mg dose (FIG. 35).

[0661] FIGS. 36A-36B show plots summarizing the mean percent change in seizure frequency from baseline in patients between ages 2-12 and between ages 13-18 years receiving 30 mg or 45 mg of ASO-1 as combined by cohort in the period between Day 1 and Day 225 post-administration in the MONARCH study. FIG. 36A shows a plot summarizing the reduction in the mean percent in seizure frequency from baseline in patients between ages 2-12 and between ages 13-18 years receiving 30 mg of ASO-1 as combined by cohort in the period between Day 1 and Day 225 post administration in the MONARCH study. FIG. 36B shows a plot summarizing the reduction in the mean percent in seizure frequency from baseline in patients between ages 2-12 and between ages 13-18 years receiving 45 mg of ASO-1 as combined by cohort in the period between Day 1 and Day 225 post administration in the MONARCH study.

[0662] FIGS. 37A-37C show plots summarizing mean percent change in seizure frequency from baseline in patients between ages 2-12 and between ages 13-18 years receiving 30 mg, 45 mg, or 70 mg of ASO-1 as combined by cohort in the period between Day 1 and Day 252 post administration in the ADMIRAL study. FIG. 37A shows a plot summarizing the reduction in the mean percent in seizure frequency from baseline in patients between ages 2-12 and between ages 13-18 years receiving 30 mg of ASO-1 as combined by cohort in the period between Day 1 and Day 252 post administration in the ADMIRAL study. When measured at the end of 3 months post administration of the last dose, patients receiving 30 mg of ASO-1 showed an average reduction in Convulsive Seizure Frequency (CSF) of about 27% (FIG. 39A). When measured at the end of 6 months post administration of the last dose, patients receiving 30 mg of ASO-1 showed an average reduction in Convulsive Seizure Frequency (CSF) of about 5% (FIG. 39B).

[0663] FIG. 37B shows a plot summarizing the reduction in the mean percent in seizure frequency from baseline in patients between ages 2-12 and between ages 13-18 years receiving 45 mg of ASO-1 as combined by cohort in the period between Day 1 and Day 252 post administration in the ADMIRAL study. When measured at the end of 3 months post administration of the last dose, patients receiving 45 mg of ASO-1 showed an average reduction in Convulsive Seizure Frequency (CSF) of about 20% (FIG. 39A). When measured at the end of 6 months post administration of the last dose, patients receiving 45 mg of ASO-1 showed an average reduction in Convulsive Seizure Frequency (CSF) of about 45% (FIG. 39B).

[0664] FIG. 37C shows a plot summarizing the reduction in the mean percent in seizure frequency from baseline in patients between ages 2-12 and between ages 13-18 years receiving 70 mg of ASO-1 as combined by cohort in the period between Day 1 and Day 252 post administration in the ADMIRAL study. When measured at the end of 3 months post administration of the last dose, patients receiving 70 mg of ASO-1 showed an average reduction in Convulsive Seizure Frequency (CSF) of about 80% (FIG. 39A). When measured at the end of 6 months post administration of the last dose, patients receiving 70 mg of ASO-1 showed an average reduction in Convulsive Seizure Frequency (CSF) of about 90% (FIG. 39B).

[0665] Patients (2-18 years) treated with 3 doses of 70 mg showed a differentiated response compared with patients treated with 2 doses of 70 mg of ASO-1 (FIG. 40A). FIG. 38 shows a plot summarizing mean percent change in seizure frequency from baseline in patients between ages 2-12 and between ages 13-18 years receiving 2 or 3 doses of 70 mg of ASO-1, as combined by cohort in the period between Day 1 and Day 252 post administration in the ADMIRAL study. Patients treated with 3 doses of 70 mg ASO-1 showed about 70% reduction in seizure frequency in patients between the age of 13-18 when measured at the end of the 3-month period following the administration of the last dose (FIG. 40A). In the case of patients between the age of 2-12 years treated with 3 doses of 70 mg ASO-1, a reduction in seizure frequency of greater than 85% was observed (FIG. 40A) when measured at the end of the 3-month period following the administration of the last dose.

[0666] Patients treated with 3 doses of 70 mg showed an average reduction in convulsive seizure frequency by about 80% by the D225- or D252 mark (FIG. 39). When measured at the end of 6 months post administration of the last dose, patients between the ages of 13-18 receiving 2 or 3 70 mg doses of ASO-1 showed an average reduction in Convulsive Seizure Frequency (CSF) of about 75% (FIG. 40B). When measured at the end of 6 months post administration of the last dose, patients receiving 70 mg of ASO-1 showed an average reduction in Convulsive Seizure Frequency (CSF) of about 98% (FIG. 40B) in children between the ages of 2-12 (FIG. 40B).

[0667] In the Open-label Extension study, sustained reductions in CSF were observed with ASO-1 doses of 30 mg or 45 mg every four months (FIG. 41). Patients receiving ASO-1 for over one year of dosing showed an improvement in receptive communication as compared to observed natural history of the disease measured on the Vineland (VABS-III) scale (FIG. 42A). Patients receiving ASO-1 for over one year of dosing showed an improvement in expressive communication as compared to observed natural history of the disease measured on the Vineland (VABS-III) scale (FIG. 42B). Patients receiving ASO-1 for over one year of dosing showed an improvement in gross motor skills as compared to observed natural history of the disease measured on the Vineland (VABS-III) scale (FIG. 43). Patients receiving ASO-1 for over one year of dosing showed an improvement in executive function as compared to observed natural history of the disease measured on the Vineland (VABS-III) scale (FIG. 44). Patients receiving ASO-1 for over one year of dosing showed a substantial improvement in overall condition. For example, patients receiving ASO-1 for over one year of dosing showed a substantial improvement in overall condition when measured under the Clinician Global Impression of change (FIG. 45A). Further, patients receiving ASO-1 for over one year of dosing showed a substantial improvement in overall condition when measured under the Caregiver Global Impression of change (FIG. 45B).

[0668] For the behavioral measurements in FIGS. 42-45, mixed model repeated measures were performed with AR(1) covariance structure. Baseline covariates in BUTTERFLY were matched to SWALLOWTAIL. Analysis included all patients who received 30 or 45 mg for all doses in SWALLOWTAIL. For CGI-C, BUTTERFLY sample size: n=32 at Month 3, n=29 at Month 12; and for CaGI-C, BUTTERFLY sample size: n=27 at Month 3, n=24 at Month 12. For both CGI-C and CaGI-C, SWALLOWTAIL sample size: n=25 at Week 16, n=9 at Week 48 and n=5 at Week 64. CGI and CaGI in BUTTERFLY were adapted for cognition. CGI-C-Clinical Global Impression of Change and CaGI-C-Caregiver Global Impression of Change.

TABLE 11
Demographics for patients treated with >=1 dose of ASO-1

| | Total, n (%) |
|---|---|
| N | 74 |

Age at Screening, y

| | |
|---|---|
| Mean (SD) | 10.2 years (5.05) |
| Median (min, max) | 10.5 years (2, 18) |

Sex

| | |
|---|---|
| Female | 39 (52.7%) |
| Male | 35 (47.3%) |

Number of Concomitant Anti-Seizure Medications

| | |
|---|---|
| ≥3 | 60 (81.1%) |
| >4 | 37 (50.0%) |

Concomitant Fenfluramine

| | |
|---|---|
| % | 36 (48.6%) |

Baseline Convulsive Seizure Frequency per 28 days

| | |
|---|---|
| Median (min, max) | 17.5 (1, 2335) |

[0669] Notwithstanding that the numerical ranges and parameters setting forth the broad scope of the disclosure are approximations, the numerical values set forth in the specific examples are reported as precisely as possible. Any numerical value, however, inherently contains certain errors necessarily resulting from the standard deviation found in their respective testing measurements.

[0670] While preferred embodiments of the present disclosure have been shown and described herein, it will be obvious to those skilled in the art that such embodiments are provided by way of example only. Numerous variations, changes, and substitutions will now occur to those skilled in the art without departing from the disclosure. It should be understood that various alternatives to the embodiments of the disclosure described herein may be employed in practicing the disclosure. It is intended that the following claims define the scope of the disclosure and that methods and structures within the scope of these claims and their equivalents be covered thereby.

The application's sequence listing, which the Patent Office published only in electronic form, follows.

SEQUENCE LISTING (1101 sequences)

SEQ ID NO: 1 - DNA, 164521 bp, Homo sapiens
  source 1..164521: mol_type = genomic DNA
ataaataaaagttgcattccatgaggagaaaacaaaaaaacccatcacagtgaacaattgaattgctccgtggacatcatgcctttctaagcaagcattgaatataggagatgtatttatgataaccagagacagagtatgtatagcttggctccataggggtggtgttctcggttcctatgtctaccttttgtattttccagcccttccctcataatgttactgggaaagttaacagctagcataacattttgaaaacccaaagtgtttatatcaacaagattattcacagtcaaattttcccataaatatcactgggacctatatttcttttaattttaaccaagagtgaaggtagtgagtatagagccctggctttagaaactaacctttaaaaataatgagataatgacacagtgaataaagatgcatcagggttgagcaaagttattttttaagattagaaaaactgattttgaaaatgcaaaggcagacaaaaaggatcagtcaagagggaaagaataaagatagaagagaagtagaacaagtcatggagcaaggtatctgagaatgtagaaatgaatgggaaaaattgatctctgaaaagatataaaagtatggattgaaggaaggaaggaaggagagggagagaggaaggaagggagagagggaggaagggagaaagggaaaggtaggagggggaggtaaagtaagaaaaaggaaggaaaaaggaagagaatggaaggaaagaaaaaggaaggaaaaaggaagagaatggaaggaaagaaaaaggaagggaagggaaggaaaagggaagggaaaagggacttagatatttttcactggataggaaagaaattgaggaagtttataatgatgtcctcttgcttgttgctgaggtgaggggctgagttatctgcaaatatgaggagtgttctaacggaatgataaaggactcaagcagttgagtaaaatcaattgatattgcaaattatccacttgtgattttaagaatttcttggtgatgcaattttcccatctatacttgattgtctagagtattttcctcctctagtgcctttgctgccacactgattaaatcaatattgattgacaacctcagtgggatatttccatgtgccaggaagaatagtactatcagcagtacccaattcatggtggtttagaaacacatttattttcttatataataagaaattccagtgcacacatgaagaatatgcaattaccagacatatttgctgtctttagtgcgacaagtttatatagttcgagtgtctgggctttgtgatacagatatacaaacatacaaacttatgcagtagagttgtctgtcccaatggttactagacttttggatttcatgcaccagtaaaatacaaatgggaggaccgacaccaggttgccaattttccacttggctaaataaaatattaaaaccaatgacccattatcacgtattctcaccatcatttccaaagaacatttaaacattaaatggtattagtctttagaaaataatctaaaagatacaatttcaggataaaggtctttaacttggatatgttcagctttataaatatttatggcattattcttaattttctggcttaactatagacatatgaaaaccttgtcataagggtgctgctctgtggagctgtgtttggaattactatttatacccacagtgtctggtccccagcttaaacagcaaagtgccaccttctgttatccaaatcagatctgtttagcatcaaatactggggtcttaaccactatgccgcagatcttttctaaaatattcttattttaattaaacagtgattattatgaagaacaaggaatgtaatcatttctgtgacttttcaggaagattactgctaggaaatgagaatagtagttaaaaaaccagtatatattgaattaattaccaacagtagatctaattttgaaggtagaaattataaagtccagggcatacaaaatatgatagtgtgaacacgcagacataggcacttcagtaacacacagcaaaaaaaaaaaaaaaatcctcccctttctaaagacacacacacatctatacttttatctatgtctgtttacatacatacatatatatataaatgtaactcatttttctttgaactgattcaagaatgagctgcagacattgttgcattcacccctaaatactttagcatgcattttcagagaataagaacattttctattttcatggaacaggcacactagtcttaacaaaattaggaaaattaacactattataatactaataactaataaacagtccatattcaaatttattcaactttcccaataatattatttatctgttattttttaatttgatattccatccagaattgtgtttagttgtcatagttctttgacctcatggaattctttagcctttctttgtctttcatgacattgacatttttaaggagttcagtccacttattttatagagtgtcctcaatttgattttccttgtagttagattctggttttaaaattttgactgtgtaccaagaagtaatgtggccctttcagtatatcttatcaggaggcacatagtatcagttggtctcataattgatgatatctttgaaggtattgtctgctgtatttctccaaagtatactttcttctgtttaaattttctacttaatagagaagagatactttaagatgctataaataccctattcctcatcaaactttcacccatgagttttaatactcattgatgattcttgtatgaatcaattgtcattagggtgattgccaaatagtgatttttctaactccgttatttcttctacaattgttaattaacattcaactgcaagaaacagatttgtacttttccttatttacttacatcagtatgtatttgctgattcttattcaatgaattataatcttttactatcatttattttgatgctcaacttgccccagatttggccagtgggaagccccttctagttggttcctgtgtcttactgacatgacctcatcattctttgaagaataattactttttagcacagaaaatatcatgccaaatatttcaaaatgaatatggagatttatatgattatgttttaccagttcttctctttgtatttggaaaggtaacagtgagtaatggcgtggatgggtagtataaaaagtctgcagggtttatcctataattctgacctaccttagttggaaatgggaatttttttcagctactaatatatcagaattaattgttgtgttgctttaggattgtgatgttatgaagaggcaaagtcagtccattgtacaaggatgggaaaagccttttaattactgtcccttttctggttgaggctatattccctcttctggcttcacctgatgacaagggaaggcttctcgttcctcagaaatttagatagattaatttagactgttaattttactatctggaccacccgagtaacctttccatgatatctgtgaattctgcactggacttcactgtggttcccccagttactgtttttctttatctgcaaaagttagcaagattaagaccccaagctgaagcaaggcacatctttgcttcctgctgactttcatgagctgttgaatcaccttgtgtcagccaggcaggagacagatggcatgctgaaatgaggcatatagaagaatttcatgaaggggacatttacaaaagtgtcagcaatgttaggagaaagctacaaggaatacaaaagcactctcaatgcagcagcagacctgaaggagcaaggggaggagtgattacctgaccccagagaaagtagcttcagttgtatgaggggcagtctgattggagtatgacttttcggggaggaatgagtccagtgccaacccagcaaagaaggaattggagaagaaatattcctatgtcaatcttctctctctggtgctttcccactggtgcttctcattggccaaaccaattgggagctcaaaggtaggagagcccatttttgcaatgtgtagaagtcacccttctgggacacacagaatgatgcagaagcagagagagtggctctggaggagcaaacacagtatcctacacacatggcaattctaaatttttaaatgatgatttaagggtttcttttcatagctcaaggggtcatccaccatcactctggcttccatacttctcttcctcctagaatcactagctatcctctgacaccagttcttcctcctaacagagaacacacctgctgcttgtaattctgggaggtcattaccccctacctccagtgacatatctaccctaggttttgttgtcaacgtgggtatgcctctgtgtgtgtgtgtgtgtgtgtgtgtgtgtgtgtgtgtgtgcgcgcgcgctccccttctcccccaatttgtaatgtaaaaaatctccatatcattagaatattctgttaacaaaaagtgactgggcaaacaataaaataaaaaatgtaatctttattagttttgcacattttaaatgttggttagcattatttagcataatagtagcattttccagcatgcagttcacgaatacagtttatctaagtagttttaaggaaaagaggagcctatggtttgcttctgtaagaaacacaaaatgtcctgatgtaattgactatataagttgactactctgtttttgtggaaaaaaaaattatgaagcccacattctatttagaacaatctagagcagcattactccaaagaaatgaaaacataaaccgaagtcagaaaaaaagaacaaaaataacataagcactaccttcaattcagttagtgcaggtactaccagaaatataaataaaattttaaacccttttccaattgcaaagcataatttggatatgaatcgtgaacctattttgctccttaaaattgtgaaataatctaaaattagcaaatgtaatttaaaaagcagaaatctacaactacccagtcttgttttcatgtcttatttagcaaatttctttcatgaaaaagtactatggacagaaagtaagaaaagtgattgtgatatcaacctgaagataatttcctcttcatatttatgtacataatgctgaaaaataaaataaagtgactttttacagtatttatatttgcttataaaattctaaacacatatttaataggttaagcagtgtgtttttttaaacatgtctgtacagtctggctatataccatatgttatccacttaaaatgtaaaaataaccaaaaagctgttaaagtgctgcaaactattgcttaatgacttaaataaatgagatctgttgaacaatttccttgactttaccactgacatatggtttctcataaatgagattctgagcagtgagagaaaccagatacagcagcatggtaatataaacatgcattgatagcatccaaactatctataaatggtacagaatacattttattacctgtgtaaagcttgcactctacatttcttgtggtacatatttgatgcaataaatactgtgcttaggtcattatttgtttgctcaaacgtgcaccacagggtaaaatgactatttacataataaatagcatttcattaacatatacagtgtcaaccttgctgagagccgaagatggctaaacaaagtgcaggaaaaagcagaaatttataaagagtaattttggtcaattcagtcttctggcggtggagggtgaggggcaatattcactattcaggttttttttttaatacaacaaaaagaaacataacatttatgactccaaacatttgaatgaagtttgcacctgctaagatttactggcctacccacaaataatctacttggtctaggggctggatttcgcaaaacaagatcaacaaagcacctccacttatcacccaattacccctcccagaaatatggtgaaatttaagaatttgtttttcttgtgactttttctcatgcatgatctctaagtgcagcatgccctcatgcaaaccacgactttgtgtagctgggagggccatgtggttgccataccccccaggtggcatacctgttatagaggtccttagcctatttctcaacagaaacttcgtttacaaaaatagtcacatataataaacacatggattaacaaaaagatgaatccactaacagattccataaaaatgtgacaaatgtggcagttgaaatgcaaacagtggatacaattactacactaaagtgtttcatgttaaacaaccccaaaatcacaggtttgcaccccttgaaactggtccctacagtctgactagccattgtgcatcttatcttcagcagtgtcagctggtagtgagaacagtaacctcctgtcaaggtcatctcccctttacacagagtcacagtttgctgacaaggggtcactgtcttattgtaggcactgaccttaaggagatttgtgtaaaaacagtcagtttggcattgacctcctaaaggagtcctgttgataaaaatacatcaccttcacaggctgtaaacaatttgtcacccaattatttttatttattttcatttatttccctttggctttttcatctttgccttcttgctcatgtttttccacaattggctttgtcacccggtcataggaaggtggacaagctgcagtggacatggtcagatcagttttttctgtaatagagttttcatttattctgtcaattatcatgtcttcttttataagaagattagccccacctttgattttgtttttattgtacgtaaaggaagcttgttttacagttcgctttaaaaggtggcgtctgtaagcacgctgaataatgacagcagatacttcctcttgttttcgttttaaagtagtagtgattggctgataggagaccttggaaggattggaagccatgaatcgctcttccatctgtattcgtagagcatccatctctccactctctcctagaacccgctttgtaaaagcaaataagatatcaagacagtggatccggtcaccactcaccatgggcaaatccatggcaatgagctggagtttgtttggttgtggcagattgagaggcggttcaagcgcagctgcaaactgagataatttttcaaattccatgaactgagttgcatcgggatcaaacttctcccaaacctcatagaacatctcaaagtcatcctcactcagaggctctgcactttcttcagtagcaacactgaagttctccaggatgaccgcgatgtacatgttcaccacaaccaggaaggatatgatgatgtaactgacaaaaaagaaaattccaacagatgggttcccacagtctcccttaactgagcttccagggttaactttattagggtcacagtcgggtggcttactgttgagaatgggtgctagcaatccatcccagccagcagaggttgtaatttggaataggcagatcatgctgttgccaaaggtctcaaagttgaacatgtcatcgatcccaacttccctcttaacataggcaaagttggacatcccaaagatggcgtagatgaacatgactaggaagagtaggaggccgatgttaaacaacgcaggaagggacatcatcaaagcaaagagcagcgtgcggatcccctttgctcctttgatcagacgtaggattcggccaatcctagcaagacggatcactcggaacagggtaggggacacgaaatacttttctatcagctcggcaagaaacatacctatgaataaacaatgagaataccaaccagtgaagaaatcatgcgttaaaataaacatatgtttcttctaaagctccaaggtaaggttcagagtcctgaacccagttatattaaatatgacaactatatataatatatatataattgtacataatatattataaatcttaattttgaaattcagcaataatttcaattataaggattatagtacttttttttatctttaagagatgtttataaactacttttagtttatgtaaagtcccaagtcagaatttaaaaagaaaataagttaaaaatgcacatttggccgaacagtagcagcccaacagtataggtacaagtttatatgtatacagtgactttttctgaaattgccatattctaaattctctatttactccttttccatctgaaagtattggtagcttttgatgctactttcatctccccatgatcttggtacttacttaaattccactctaatatttttatatactcatttatgtatgttctggtgcatttctgaaaggatcccaggttgatgctctttttagtatcctgtacttaatgttgtatttcaattctttttggtctcctgtacctaacactgtaatctcagtcttcttattttcagcttctctctccatttgctttttagataaaaacaatacttgtaaagttaaaaagaagagctcaagaaactaaatgccttcaagtttaaatgcctcattctgaaaagacgaagtgtaagagtgtgtgtgtgtgtgtgtgtgtgtgtgtgtgagagagagagagagagaaggagacgtgtgagaatacaacttttataccttagccacactagttataaccaaggattataattagtgggaatcaaaggctatatacaatgagctggatataaggccagtttcttcagagaggggagtggcatgaaaatctgtccaacacaggtgcctcgttttggatagtaaaatattgacccaatcatatcatcctgtttagggaagaatgaataggcccacagacagatgctttttactttactagagctttagttttgtctaatgaaatgagctattgctcatgaggctagttatgtgttccaggctttgaagtatagtactgatgatgtcccatgccaccttatttcccttgtgcatcattatgataaacccatttttaaggtagtctagaaaatctctacatgacacttgcagagaacctactatatgcatttgctaatgtttagtccttgtctttattctctttttatgcaatacttttccttatcttgaaaccactttccactaatatctatatgctggtgactccatgtctattctctaaagcaattttcgtgagtaccagactacatttctagtcttgttaacagaaccatctagatactatattggttcttcaatctcaacatgtcaaaaacatttttattttagttaatagcacagttctagttcaaatgaatgaggttttactacatttacactaagtatattgttctaaatggatagaataagaaacaatactgacatatagtaggagacattttgttaaaaaaacaaacacacttggataaaatgtatcaaaatatttacagtgattatctctgattgctgggatgatcttgaatctaatcttgattgtttcagctttcacttttatttaactgaatttaagaactttaaatatttcttacctacaatggagagaatgacaaccacaaaatcaaaaatattccatccaatggtaaaataataatggcgtagagagatgagtttcagtacacactctccagtaaatagcacaatgaacaccagattgatgcgtgacaaaatggtagtcacatattcactctggtcatctgtttccaccatcattgtgaccatgttaagacagatgagaatcatgatgcttatgtcaaaaacttgtctggttacgaagtcaaagaccattccttgaaatttgttctgtagagaaatagaaatgcttttaacaacaaaggagttttctcatgtgcattagcattaagtactttctgcattaattgactttctagtttcttgcaaagtagtcattggccctgatttttgtaagaatgatttatagcatattaattgttaaaatttagttatttaaattgccatttactaatgtgtatttctcagaataacaatcccttatccaaagaaggtttctgataaaaacaaacaaacaaacaaacaaacaaacaaaagaaacattcaacactgtatacttcttccagaggtatgcaacacatatcaacattttaagattatgaaaaggtaagaaacccatttaatttttttttcaagactttccaatgatcagctggaccatacatccattttaaaatatagtactattaatatttcacttgttgtattctcaaataattgttaaggagaatttggaatttccaagacacatctataacattatgcatttaaataccacatatggcaatactcatattcttctaccaaatagccttggctaacattgtcagacacagaatcctgaaactgcacaaggataatgagaccagaatgacatttcctatatgtttatgtcaaaaaaaacttcacgttctttgtcgttgatctgtgattctgcttcccatttctgccactgctagtcactgaaggccatctgcaggcttatttctttgggccactgaggaattctgagggaattttccaacttatatttttcctaaattgttgtttcatttctactcttagtgctaaattttaatggagaaagtatatatttctcatcattctcaggaaggcaatattcaatcatcacaatatgaatatttgctagtagttttttccttgatgcaccctaggaattactgaaacctctcagatcatcatcataaaaatatttatagtgtgggataatagctgtacattttcatagcaatttgtttatttcatcatggaagcatgagtattgttatttatcatcataaactgtaattactgaccctgacttctgcagacattagtaatacctaactctatagccatacatatgaatagtagatactggaattctttcctcctttaaaacacttagtatctctagtgaaaaataaaatagaagtaaggtgttatttcactcaacacttcatttcttaaaatattaggaaattgcatttcttacagccccatcccaaggtttacttctttccctgatattacttggcaaccattcttgagttgtgtgattaactttctcttgtgcacatcacattgtctatgtgtccattggccaattaatatggattgtaatggggtgcttctaaatctcttgaagtcaagggtgtatcttctatttcttcttgttcttttttggtctttaattttttttgttgttaccattatcataaaagatacaaacatcacttttagatgatgctctacaagtgaaagaaattttttctactggaaatgttagctactttcttttttgtgagacaagcatgcaagtttttgtttttgtatttttcccccatatcatttgatacttcttactcctggtcgaggtataggcttttgcggttttttcgatcctaattttttcattgcattatagtatttcttctgttcttctgtcataaagatgtcttgacctccaaagtatagaaaagaaaaatcaaactggttaaaactgtgtccttttgtacatttttttcaatgttaaaatagaaaatggatggctaaaaaaagaaatacaaaattcaactgattagtataattatatctgggatttaaaatgtaaaaaaaattgtactctttaggtatgataatatttaattccctaaataattcaaaattgactttattattattatcttatgaagacaaacacccccaaatctcaaaaaggttaagtattttacccaagaccttatgcttagtgagtggcgaaatttggttcactgagataataaatacttggtaccttatactatacatactacctttatgatgttaaaggcaataattttcttatttaaatgtagcaaagagttagaggatgtatactgcaagacagtttggagttactcattaaaaaagtcactctaactctgtcaagaattggaggaaagggataaaaagaaaactggatgagttagtgagagatttaggggataaatcagagctcatagcatagtaagtatgggacagaccagtagggatagaagattggaacactggcaagtaagtgaaatagagtagcctgatattgacttaagaatactactggtaataagaaaagggaattgaggggagaatgttctgtagtctaagaaagcactcattcattatacaaaaagcaaacctactgaacaagtgagatgaagcaacagtacataaaggaagaaatacaaatggccaatgagcatttaagaacatgttcaaatgtaataaaatacataaaagtcataacaattaaggttataaaagtcataaaaattaaaattaaatacagttttcacctattaaatatcaaatattcaaaaacagaatgtttggtgacagtgagggaacggtggcatgggtgttcatacactgatattgggagtttgagtagttatattactctaggggagtaaaatacttcattgtgggaatttattctcaggaaataattaaagccttattttctgtccctctctctttttttttgtacaaaactttcaacaaggtactatttaaatcattaaagattaaaaacaatctaaattatcaacctactggggaatgaataagtaaattatgataatgcatatatgaagacttaacaaaatgagaaaatacttatgttaagtctaaagtggaatttataattatagataaaaagtacaacaataagagtatgtgcagaaatactctgaacagaaaacaaaatgtgaatggcagcagttacttccaagtgatgatatttatttactttccatatgttctataatgtacataggtaattgggacaatcaaatgagccttataaatgataaataatagtcatacaattcaagactgaaacggatagcttgtatttaaatatcttggagaaagaaatgggaatatataaaagaaatcaatgacagaaaaaagcgtaaaaataaacactagaagaagcttacatccagtgcctaatttattgcaaagaattagttggaaaatatattttcaagggggagtgggtagttgtagggataaagtaacaaattgcttttgggaaagaggcatattcggttgctttctagttttattctaattattattttttaaaagatagaaaatgtttcttgataatgaataagaggaggaaaaactttatgaacctatgaacaagagtgtggaacacagttattcttagctttctatagccggaaatatatggatagtgaatgacagaggaagaggaaggaaaaatcagttataatatatactcccattttgtttctaaattcaagtactcatttggcagagaaaacactccaaggaataattttctatctcagtgggagagaaaatattagaaatacttatcttctttttctgctggttgaaattatctatgatgacaccaataaacaggttcaaggtgaagaaggacccaaagatgatgaaaataacaaagtaaagatacatgtacagactttcttcatacttaggctggagttccacctaccaaaggggaatattttgtaaaatattaccatacattttagtgctggaaatgtcactggtgctttttcataacaatagaaaaaattattcttactaatatgtcagcattttttttttttctgaatcaactacctctaaaaaacatccctgaaattggcctttagggatgttttcatgtgaaaaatatggctattatgacattctaaaatctatttttataactataaatacaaataatattcttccatttgaacagtaatgtgctaaatttgcaagcttttaaggtactgaattttagtaattttaaaattattaataaaaaatttaaaactgtaaatatctacaggctaggtttagaaacagtcattcatgtatgcatgaaataatgtagcaaataagaaatgagttgttcattcagatgtttggcactttaccctaaagtaacagttattgaatttttcagattaagtagacatagatggacagtccattttataaatcctcagttgattatttaattcctagattgtgcttaaaacaaatgggctattacttataatttagtaatggactgaaaggtcactatagttttttaacagattcatgtccttctaaaagcaacaaagttaaaaaccaactaaacacacaaaacaaaatataagtgacaaagtgaaataaaacaactctggaggttatcaaaatgatattcaacataaaactaaagctatttgaaatgcacttcaagaaagataacatcaaactctatcaggttgaagactgcagggacagaggttattctttatgatgataaactaaacagatgggacttgagaatagaaagatgaaggttgatagaaaatactacatcttacaaagttttgaagagcaaagttggaatgagcatgaatttcagtttaggtcttggagcctgaaagaggctgaaatcaaataaaataggtttatattttggtgatatacacttaaaggaatctgttggtcacagaagtgattgcaacattagtaaaggctccagtcaatttatgaatgcaaaaatcatataaaaacattcttttatatggtttaaaataggattatttgaaagaaatcatcacagtaatctaaggctgacagaacaatatccataacttttcatgctgtctaatatggagggtgactatacatttcaactaatgatagaaatcatatatttcttcaaatttggtcccgcacactaaaattactactaattatataatgtgtggataaataggaaacaaaatagaaaatatttaaaaggaaaatatttgttagttactaaatacatgaatttgttactttggttttcaaaataattcatgtgttgaattatcttagtaagatctttctgataaacattgctatgcttgaatatttacctgtcacactttttcccaaatattttaaatcaagatagaatcatttcatttggtcgtttatgctttattcgattaattttaccacctgatcaatattgtaaaaagacttagaatacaaggaatacttacatttctggaatcaactgctgcatacattatatccatccatcctttgaatgtggcctattaagaaggacatgcatgttttactttggagtaaaaataatttagacctgatgtttaataaatattcttactgatataattttcaaaagggaatatttttgaaagacatttcaaaacaaattttacacagattttggaccaagacagtattttagtatggcttttcatttctagaacacatattgaacaaaatggccatttgatatatcctccccttgataaccaactcacaagcacttttcaattctttagagttcatggtgtcatgatatttaaagcagtattaaaatttgctggagcactttttagaaagtcttacaaatgccaacacatgggtcaatagctctatcagccaaataattacaacttagatctaaggatcatctgctaaaatttatctgcagggtgatcaaagtgattgaaaatttaagatttctctttattgtaacaatgtaaggatagtaccaggatacataaaggcagggttgcaactatccttttaagaattttggagcaaaacatttagaaatacaatccttttaagaattttgcatcaaaacatttagaaataaccccctattctattttctttctgaaattcttgaagataataagttaatatgaataagaaatgtgaacaatagtacagcagacacttggcactcacaggatgaaggatactcaggctaacaacttacagtaatttgttacttgtcctggggcatgaattttgagtcctgtgggcctaaaaggattatcccttagctagtgagggaggttagcaaagcctttagcgtctgtatcacaatatatctttgttctgataacgctaacccttgtgaggtggtggatttcatgagacaaaagctaagcaagggtgtgggtgacagcagtgaaaagaaagtaatgattcctagctagaaagtacaaggcttttgtatatgaaagagagagagatgtgttaaatatgtcagtggcttaggtcaatgatagaacaattccattacacacttggtatagaaacaaaaaagtgattcaagggaccatttcaatgacttactaatcaatagagaggtgattctataaaagccaaatgtgaagcagtattttagagggttttttttttttttggtggcagaatttatttaatagctttgtgcaggaccatcactgtattttcagaattgcttacattttaaaggattgcttaaaatttttaatttttctttcctcaaatttatggaggaggtggttgctttagtgatatttacaagtatggtcattagttaagggttagaataagtgcccaaataaatatcatcatgtgtcgacaatttttaaagaaagcattcttgctagattttttttaacttttgtttttatttgtctttagagacaaggtctcactatgttgcctccactggtctagatctcctggcctcaagcaatcctccagctttggcctcccaaagagctaggattacaggcatgagccaccatgccccacccgttcttaccagatttaaaaaatctctattttaattgcatgaatattattcagagtagatcaaaaatgttaagaagagaaataagaatttccaacaaaaaggtgggaagaatttgtaaagtaatcatagttgacacctctggaagagctgcaaaagggttttgaccagtgttggtttgtttgcttagttagtcttctggttgaacagttgaaatcataaccttggtgagcaaaaattgatttctgccctaaagacactgtagaaccacaagggaagaaagaaattgtacagtcttttttttttaagctgagttttcaaataatctggactcttattttattccctgctttgttgtggtgctgctgcagctagaagcagaatcaaatgaaaatgtttaaagggctaccttttttaaatataaattataaactatttttcttggagacccagtcttagagacccagtagtgaaaacattaatatttaggacaaaatagacttaaataatggtgctgaaaggtcatttgagataagacaacagctgcttttgcttcatttttgtttctagttgcttccaggtataattctctctctttttttttttttttttttttttttttagatggagtttcactctttgttgcccaggctggagtgcagtggcacccaccgctatgcctggttctaattctaaaacctaaatgtcattccccaaactttgatccaaataatagaactcagcagcagttaatccctaccaattaattacaatccaattaggtgtattaagtgtatgtgttttggaagatgatctatctgttaagtgtattccgttttggtagctgatcagggaaacaagccttctaatcacaataaaaaatggcaaagttactgatttattaatttacttgtttatatagaaagagcaatatagaaacaaagaaaatacaagaaaaaagacaaagaggtctttgtttggtctggtcactactgactatatctgcagtccttacatgtaataaagttttcacccatctgggctcataaacttgtactaacaaattgaaattttttaaatagaaagaaatatatactttttcttaggaactaaataatagatgtatgtcattattttgttattattccaaacaataaaaatattcagagaaaatagtgttcacttacaacttgaagcaaagagagatacccaaatcctacattatcaaagtttactttcacatttttccatcgagcagtctcatttctttctattagttttaggcaatcagtatgattattcacgtcttcgatgtcaaacctgtcaccagttgtggtgttaatacagtggtagaatttgccagcaaacaaatttacgcccatgatgctgaaaattagccagaatataagacaaaccagaagcacattcatgatggatggaattgctcctaaaagggcattcacaaccacctaatacacaaatggaaaaaaagaaaagtcagaattcttatctgttaataaagaaaaaaaattcccctagtaatctctggtctttccattctttttttctatcaatgctatttattctaggatatgtaaaagcaaggttcaaaaaaatcttaaaattcatttttttttcttaagcaatacacttaggaaaacaactataggcaatataaccaagaaatgaaacaaaaatgtttttaaaaaaaagggagggagaagcattaaaaggttaaaggaaaaggaaaatcagaggaacttgctgccagatgaagtcagaattgtgttatcagaataaagaaaagttaaaaagcctatacagaagtttaactcattttaaaaaggcaatatattaaagaacaaaactaaaacatttggacctgagttgatttgaccaatatatttttaaaataacttaaaaattcagatgataaatataaaaaatattattaaatacctaatataattgtctttaattattcatgcattgctatgactaataatttttgcataagaagcaagacaatttgcattatgtatttcattagatcatcacatcgtttatttcaagctccagtcatgtcagttgtttcatttactgagtttaattcaaaaaacttatttcaaatgaaacataatagaaatcatttcttaggaaaataagaaaaagagggatgccatacatagttctcaaatctgatgtgatcacatgaagttctgtgttcaattattatctacttttttttttttctatagaaggatgttttccccctctttacttctggaccactagttaaaaatcttgagtgttcatgtttggaaacaacatagggatggcttccttgctttttcctccatacctcccactggagctgcacaggagtggctaagagggaagctaaaaacagaccctaaaatgcttataaggggcagctgcctcaaacttggacattaatagctaagtttaattccacctatgtgcttgtattattcttgtcagtctgatccaatggaagtagtcgtcaaaacatcttctatttgccatttgatgccagtgtatttttagaacaattttttttaactgcctgtctgaaaaaaaaatacatgagccaatttcttatacttctgatccctgtttaaagcctgtaaagaactctaggccttctggggaacataaaacagtgtgataagtgggccaaagaaaataagaataccagtaatgacaaaggtggaggggatgagtatgaaaaattaatttggttgagttatccaggcagaaccaaatgatgtggccgatgcaactaccaagctgacacgtgacactttgccttatctcatctgactgtctgcattaatacaatggacttcataaattctcgttatataatttattttaaatggatgaatagaattagatttctttcagattagagatttggaaattgaaatcaagttactatttcccttcttttctgaatattttgtccactatccagattacaatgctgtttctagtgtgtatacacagagtactaattaaaatacgtattttgccttcaacacccaatttagagtatgagcagaacactgattatctatacctatttctcgattttcttttcacattacctgtctcacattttttctttgaaacgtttctcagctttgccacctcttttccattctcacagtcaccacctagaactgccctctgttatttcatacttgcactgtcatctgtctcctaaccttctccttcatttaatctatgtaagatgaattaatcttccccaagtcccacttgaaagttatttattggctctctggtaactaacaaatatttttcttaccttggtattcacatcactccacaatctatatttccagttttaacttccctggtcatctatacttcatgccacttcaattaatataataaccgtgtgctaatataattgccaggtgattgagatgccatttacattgaaattccttgtctaatagctcctcttctgaaatactctcccctcttaaaggctttagttcaaatagcacttctttcatggagcctaactttgtcccccagtttagcctccaaaataaagaggaatgttttcccctttgaattcaagaatcagaattctagtactgaacagaactgtacagataattcagtattgcgttctcatttggcatatgagaaaaatgaggttaaaacaagttaagttcagaaagtagcctataaatagcatttagtgctgtttccagtctacgtggaagagttgctcccacttatctggtacccatattactctgtactagagttcagtgtaatcctgacagattgtaagattttctaaaaatttaagatgcaaacatatgttcgtgaatcttccagggccttgagtgtcttgaatataagaacataccagagagctttgaatataggaataaaataatggttgacaaaaatgaatgggttaatgaagcaaagtttagattagtatttattgatcaaagcataatttttaaatgttatttctgaatatgggatgagaataattaaggaactgagcacagggagaagtttgtgcttaggtaatatgtttgagaggtttactttgaaactggggattgatttagagttaaagcgaactctatggaatttatgacgcaagcatgtactctgcagcagtgcacttcaggatatgatttgcaaagttggcatacatttggcccagagaaaagttttattttttttgtgaacataaaataactttatcttagaaaacatctggcacagtattggggagtttattatacaaagctatagtcatatttatgatgtattaaattagacaatgaaagatcatagaaaagattgtcttttcccaagagttccaagccattccttggttcagcaaagaaggaggtgtattaacttttttcagtctcaataaagctgcagtaattggttcttatggggggaagaaagtaggcagaattagtctgaataaattggaaagaacaaatttcaaattgaactttcaggctacatgaaaggaaatgtctgagaaaggagctatcttaatgaattaatactgtactagaggttgtttcttctcagaagcttttttttcaaaacaatcatcaaataaagtttctctactctagcacaaccaattctatttctggttcattacctgcatttttaaaaataagtctacactaaatgaaggattgataattaaatatgcaaattcacattagaaattttcatacatgcagaaatgtctttttatctgaattaattactttgaacttcaaatcaacactattcatgaattctagtgcttctctaatagaaataaagaaaatctatgtgaataaaaataaaagtgggcaaagtaggaatcatccatttttaagtataaagaagaataatagaatctttcttaaaaatctaaaaaaattatgttgtgggttttaattaagacagtttttttgtaagctatgatatattggtgatccaaacaaaaattctgactttttctgtctctcgaatataaactcttcttcttgtataatacacttaaactttaagaataaataaaatgtagagttatgtttatgtatgttttcactgtgttatgttttaaaatcctagaaagttagttgggagttacttattctaagaagtgagtttatgccttaaattttatcttaatactcatgataagacgtttttgttttatttctaggtatgtattctattctgcataattcaaataagtggatttttttattctaactttttgtttacaacacaattcacatgtgcttattcaactatttcttaatatatttttgccttgttaacattttgaaaataaccccatatgaacttacacaataaaaaatgagagtggtcacaatcaataccagtcttatgaaacctgaaatattgcaccctagtatctgctcatacatatcaataatcaactgatggtatctaactggtaattttcaggacccagaccaatgtactaaacagcaggggctgtatgcctcaaacagtatcatgagcttaacaagttaaattgttttttcacataatcattctacaccagggtcccccgccctcaccaatccagtaatctccccaaagatggataactccatatacacataactaaatcatattcaatgaaacttaataaagatatcaaccattggggttaaaatccacagagggtaaattcataaaggtttttttttttttcaaatgaaatttaagacaattgaaaagaggggattaggatgtaaataatgtattttccctactgtggtgcaataatagtacccttcccaatccctccctcaccccactacacataagtcacagtgcaaggattaaaggtagcaaaaggggtaatacagtacccataataaagggctcaggggaggaaccagcgctccaccccatccaagttggagcaagattatcctatacaaaatagaaatatatagtttgttattagttagaaatctgatatgacagaacatttggtgttactttttgttcatgatgctctccgtctgtttccctatccattaagacttgagttcttttgaaaaagaaggtatttaagatttcctaggttaggaaattaaaaatacaaatttaaacacaaattttattttaccctagatattcacgacatcaattcactcagtttaattttacaagttgaaaaatttggactggaaatttgaaatacaataaatgtttaaaagctgtcagccagaaatgtgcataaaacatgcaaaacacaaagtgcaacgtgatgataatttatttgttactttctaacttcttatcaagcactgtacaacatgctttattcagtaatgttgcataaaagcacatgctttgaaaaaataacagaacaacaaaaataaaatgagtgcctgagttacgctttgacgcagctattgtgattttatgctgctagggcaaagaattaaatgagagtttctgagcatgttcaaatctcacttcccaatcataatcatcattcttatatccaacctcaccatcattcatgattatatttttacaaaataaaatatccaaacactagaagtataaaaaatagaatcaattataacgttattttgactctacaatgccaaacacgtattgaagagattagtcattttagtgctgtgtgtatgttgtcattatgaggaatagagccatattcataaatctgaccatttaaactattagttatatcactatcagcatttataaggattttatgtctaaaactccaagtttcaaaaactaacctcttttaatataaaaggcattattgattaataattatagatatggttatttctgagaaaattaaaagtataccgataagatcagcttttttatagaaatgaagtgtaatgtatggaaatatctgagcacttgaccaatgaatttaataaactttcaaatggtcaaatgtaaaaggtttataatattttcaaatgtttagcattgttcagatttcacaagccatataaaatatattattttgattcaggcaacatgttttcaagtagaatgtacacaaatgacattttttttctccagaactgaaactgccagtctgaaacaaaacaaagtgacatttaattggaaaacagacttaattcttatacaccccagagataatttctgttaacattttggtgaaaatttgaggctctctgtgagaaataaaagaggactacttgtattatattgttctgagttgtcgataatgaggacaaagttttcatatatgttagggaaatcgaagacaagtcctacgttcttacaaagtgacatttataataagacttgagaagagaacataaggctataaacaatctacaaagtgcaaatggaagtctacaatacagcttagtttccataaaagtaactacaccttaggaggtgaaagagcagtgtttttctattggaatcacacaattcagtgttttgttttgataatatttttttttaaaaaaaagcagaactaattttttatattatatatctataaactaatgcttcatgccgtaaaaaaaggcatggaaaataagtcaataatggcaaaatttctaatctgttatgcatgatggaaaatgattattgcatctttgaaaaggataaaataacattttgtgtgactctgaccaataagatgcaagttaaggttaatgtataaattacctatagtaatgagtcaaaattatattttctgttcattataagtgttttactttattgttataaaaatgatgtggatttgtatgtaatctttaagttagtattactagttttataaattcagtcaacacttaatatctaaccatctaatcttgaatatattcaaataatgcaaactttggcattatacagacaaaagttttaacaactcctttcatttttttcttaacactcatacttaggcacatgtgtgattcacattattttcaggaaaactcgttaagtacagtatatcatcacaaagaataagtacctgatatagaatttactttagattaccattatatcattacacatagtactttaataatgcatcagcttttttttgtatatagatttgtaaggaaactcccaagatggattaggaaataaagtcatttaaataagcacagcagataaatgatattatatcatttcaagagaggcctatttctcttgcatatcacctagaagtaaatatgcaacagataaaacaataaagtagcaattttgcaagaatttgccattccttttgcatgcatagattttcctttttctaaatttaatttagtttaattttggctatatacaatacttcaggttctttcatttttcttaccctcatcccttcaaatcgagataaggctcttagaggtctcagagctcttagtgtcctgagagatttgatggctccaagttctgagtaacccaaggcatttgctgttaaactgaccaatgaaacctgcacacacaaaaataataacaattaataaacagaatcatcattcaatgtgtagttgctatataatacaacaagtataatttttgcttataattattcagaggataaatgttcagacattttcagtaaacctttaaaaaattaaagaaataatttcagtttgatgtaaaggatgtaatttttaggacattaattaaaagctagttgaaaaaaaatccttaaatgtcatataatttatcaactgaataaatagaaaaaaaaagcaaagtaaaaattagtaaaataaaagaagaaatcaaggtggaaaaaaattcattggctattcttcctttattttattaagttgctgttgaatttaaggcttttcttgtagctagttataaaatacaaaaactgctgttgtactaaaaaaagcaggaagtttctactgtgcatcagtatattcaactaatcataattggtattctcagaaattaatgaactacatcagttttgaaggtgatattttgtcttggtaataccttgcattttcacttgtttatttttacataagtaacttagaaagaaattccattacaaaacttcctcaaaattttttatactaatttatggcttctgccatgatatctggccccaaagggccaatcaatgaatatttaccaaatacacacagcaataaatttacttcatttgtattcatttgtaggtaatatacatgactaaaggaaaaatcttacgtatctaattctctaaataaggaatttactaaaactttgtattcaaggaagattataacttatttggttagaaagatgctagtattggagaattccgcatatactgcacactatttttgtaaacttttcttttttaaaatgtattaattgtatcatatttaatatacttcttacattatttgagatgtgctgtaattagtccttttatagagtgctatactgatcttcattaaagaattaaaacagaacattgaaaataaagatattattgttacaaactacaaaattttctataaaattattttcttaaaatgtttcaaaaatgacactaaaaaactttcatgaaaaagctgatgtgtaataaacataatagaaaaaaaacctcaggaagttttaaagggttaaattacatttagatttaaattatagtgtaaacaattctgaaattgaaacataatgtaacttctaatgcttgaaacctcaatattacaaactttctcccttattgatgtgataaagcaattcttcctttgagatttctctcaattggctcatttcacagtaacattgttaagttttttaaatagcttagttttgcctttgttcagggtcaaggaaatataatgcattcatgattcttagctcaagaaacactttccacaagaaaccctcatagtcttgctgggttagtatctttttggggtaaaactactcaatatgaaatcaggatagttttgctgtagctttctaaagctgaaattttgccaagttgataatagaaaacatgatgcttaactttaacacatcttgaagtcagtcacttgttttcagtaaatgcagtattaatcattggggatacaaattctataaagggctgtttgggcttgccgtaaatctagtttacattctaggaaaactttcactgctgaataaagtagacttctctttccctacactctacataccttacttcctataatgaagtcataatccatataatctactatttaaatctactctttaaaaagtttgagtagatcaaatagaatttttttaaatgactgtagcacccaacagcatcactgtttttattgagtgcctttaatactgtacaagttgggggtcaagagtttggggccaagaaactaactcagtggcacaaaatcaacaagtgatggtcctgggatacaaacttgagtctgtctgactcacaacataaaggatttaagcaacataccttttaagttccctgtttcactactttccctacaaactgctgatgtgttgttttttctttagctttctcagataactagagaactaccatagattccatcccccaatgttattttaaatcagaattaaattagcccttgtcttccagaaatgacactctcattgcatatatgcgtttagtggttattatagtctgtcaacataacatagtggtctgagactcactattgtagaatttgaatataaataagacaagctaccttgaacagagacaaaaatatgaacgatacctacatcaacaattaagaagtccagccaacaccaggcattggtgaaatatgtttgatagccatatgccacccattttagaagcatttccagaatgaaaatgtaagtgaaaaccttgtcagcatattccaacatcgtcttaatcgtctttcgctgatcaatatatatatcttcaaatgcctataaagaaaatgttacacattattagctttcaaaaataattatactccataagctatttaaaaaattaatcatatgcatatgacatttcattggaataggagggcagagaaacagtagttactgttactttttttttttcctcgcaaaggtcttttacttatttaatcaggggaaagactattggtggaagaaaaagaaaagtatgattccaatgaattaatttgacttagtcaggaaatagttcttgatgttgtatcctgatgtggccatcccaacttgaagttatgtattccttttgtttcatttattttgcttccttctattggctttttttttttttttttttttttgctatagaaaggaggttgaagaaataatgaaagcttgtgcttttgtaaagcagaaattgtgattgatcttcgcagtctccaatttgactaaatagttgggttcatctgcttcttttttgttgttgtttgttatttttttaataatttatgtttctcaacagacatacagtgtgacaatgattaaatgaaattacttttcatttagattctaatatatattcttctattatgaacctctcgatgtttcacttctaagtatgcattcctttcaacggtgaaagacttctaaagtagcgtgtagaaaatatttctttcttcagaaaaattacaggtaaatatatgtctgtgttagaattataaaaagttaaacttgtaacacacttgcatttcaatcaggcaaactctgtttctctctctttctttctctttttctatctatggtatttcctttgtgttagtgtttccctaaaatgctatctgtatgttttatttatagttttataaataattttcctataaaaataaattgattctgatgaagtgaacaccttgttataaagataaacccatccttaaatgaatctcttgggcatgctgcccaatatttattgttaccaactttcattatttcttaagtagcacaaaaatagtgagcacacaattggaaaaagacagagaagtggtccctaaggacttactactgtccatcaagagataataataataaataccatttagaaacaaaattcgtcagaactcagagaatatatattcccatcccagggcttccaataactttttttaattaaacaatgagtaattgaatattcacatcctttggtgttaatgaataagctgaagggctacactttctgggctatttaatagtaagcaaaaattaatgattagcttcttaaaattatatttacatacatagtaaaagttaatccagaaatatagagttatagagtaaatctatagaagatacaaggtgggataattaaaaatgcattggatactaagacaatgaaacaaaggattaataagtcatcagtattagagtgttctaaaaattagtgctgtatcaccttttcttaatctcactcaccagagcaccactactaaggagaatcatgaaaacaatgaaggtctcaaaccagttatgttcaactattcggaaacacgtccttctcaggttccaccattgttttcctctgccttcttccacattgatttgacaacacttgaatctttgtacacagcctgcagaaagtgttgaaataaaagtagataaagtgtctctgcttccataatatcctttagcaatgtccttgtcttgtctttttattactatgctcatctctgtcttgctagcatagctctctaagcctagagtagtaagagcacattcatcagctgtgtgaagttgtggaaacattcagccactttaaatgatgccctagcggacagtatttgctttgtctgcctcacagtgttattgtccaagagaaactttgtaaattacaaataaatgtgaggtagcttttccttgtaccatatcatcctgttgcactctgttgaagtcactccagaaaagaactttaaattggacattaataatgttaagcagaaaacttcccttttataaaggatatagagtaaaaatgtagatctcttccaacaatgctgcatttgttaccatttaggattttttgtgatgtgcctagaagggcttatgtaatttgcataattaatttagttcactaaaagctaatttgtatgatttggctttgacttttcattgccttcctcacacattgctttcacttagtctaaatgcaatcaacaggtacttctgagtaccattgtaagcacaaaggcacttaggtacacacacaaaaaggcaccgaacatgtaccttactcccaagaaccttaccaaaaaaaatctggttttcaaaaaaaaaaaaaagaaaaagatataaatacaggatccctgctccaaggcaaaaaaaaaaaaaaggaggaaaagatatgtttgaagaaaaaggagaaagggaatgaatggagaaaaggaggaagaaaagaagggaaggaggaaagaaggaactaaggagtgaaggaatggaggaaaagaagagaaaaaagatagaaaagtaacatgtaactgttcaaaaagagaaagagttttcataggataatgtatattatcgggtaaattaaatggaaatacttcttacagccattcagaggaacaagctgctgttccaccatggtcagatgagggcagttttgaaaaggacattaagtgatatgcatgatttgtatagggaatagaagaagactgaaggtatactaggcctatgaaaaaataacatcaaatagaaagtatgcatatttccaaacctcaaattcccagggatatcagaccacaggaaatattagttgtaggaaaaacatatctcttctatctattgcccatactgcaccaggctcaactagtgactgtttaggtatagagtttctagggcagtatttattccccatttcatccaacaattattggaaactgatgttttcattaaagaaacacaatttagcactagcaatccgtttagttttagcagtcagaaagttacttttaaggcaaattctgtgtaggatcattttcagtagtgtctaagatgccaacttattgtgaaatcactacttactttaaaaatataagttagaagttttgatggtactaaaatatttttcctccatgttcttaatctcttccacatattgggcagatataatcaaagcatgacactagactttaagtttttttgtctgtcaacatattagaggtgattgaattatatctattacaaagtgccattttattatatgtgatttattttagctgaccaacagctaaacaagctgcactccaaatgaaagattaacattaggattcttttctttaccttcagtgaaacaagcttctggttcaagagtttcttcaggttccactacgggctgttcttctacaggtgcgccgatgtccacagtgctaccttctgatgagctactgctttcattcagtttctgtaagtgagatggacatagaaagtaaagtcctttaattttggtaataagttgcctgccaagaaaggattattactatgaatttgttttttattcttcttgaggtagagatatttttagagaaaaagagagattgaataaggggaagaaataagaaaatcattgtctgtgctaacccttttaccataattcacaatgtaagcttgaaatcagattgctatgttatgaggttacaaaaggccatcagccacatgtactgagcaaaacactgccttgtggattagagaagcaggggacacagggaagagaagagggaggaagagaaagggaaaaggagcaggagagaaagagaaagcttaccttagaagaaaataatgtcgttaggttattctgcagtttaatgtttgactttacatatttctttaacaatgtcttacctgtgtgtacagatactacctgttgttttcacttatgttactaagattcatggttaaggtgttcagagttatttactataaatgtggtcatttggagagaaattgttataaaatatgtcaaaaattacatcaataaacaaccttagagatattaaatagacatcttcaatttctggcaagtattttagagcctgaagtgttgtaaaatgagataaatagtgtgtgggaaaattcagtttcctctgacaaatcatgtttatgttaatgtgccatgtgaagctgaaagaacaaaatctagttaaacaacaacaacaataacaatatccttcatattttgacaatagtgatgggatgcacatttctctttctagagttctcagaagacaaagatggcagagataatagaaaatattaactaacatattaagataggaaaaactcatgacgctctttctgaagaccagcaaactggcttataagtttttggcaagtgtaattaattcattaatttattcaactaatattttttgaacaccaacaatatgctaccagctgagtattcactgataactgaaatatctattgtccttattggagtatcaaatctagtacagtattttctaaacttcaggcttatgtagacccgacaataggcattccagtgcacacagcagcaagccattcaacccgttatcacgatattgtaaatagtaaaaattaaacacaatattaaaattgttaatatgaatttcacatacataggagagtgttgatatttcagtaaaagtttcaccgaaatatttgtatttgcttgaagaaggatagcttatatgtctgggtccatatctagttgccttctttcctttccttttaatttcttaaaatagaaaaacttacctgacagttacagaaaattaggacctataatggcatgtagctctgtcatagctctgtgaattcaggttgaagatgatctttgaaattataaaatatttctcactgaagactaatttcaacattctaacacattaaataggcctgcatactatgctcagaagctgaaaagttgattgttcaacatgatagacagtagtaaatagatcataatctactttcgggttgcatttagctttgactatctttgtgttctgttctagcatttgcactgaatttaaaacatatccaggaataagtcattggtttcttcctctgacaaacgaagagaatcacctagtggcaggcgttagtcacattctcaatcaaactactcataacatcacatgatcttctgaagaaattcttatgtcttatcctcaacattacacagattcatcatttggccgtaaagtgataggctaagacttgtcacttcaacaagtgccttcatattttaaaaatgaccttgattggcactatccgggacataatgaaattcattacatactttataaaaaccatgtgagcaacatttcatcacccattgttcttcactgtagaaaagcaaatgcccattcttcatgaaacaattagagagtggaatttgagaattttaacaattttcgccaaaattaattaagaactagaaaggatattatttcctgtgaataaatttgtgtggagaggcattcaggtacaaagaattataatagcaaacctaccttctatatatataattgttatctgctaggtctgatccccacatagttttccagtctataccaagactcacaaaataatagaatattagcataaaaatctactcttcatcagtataggttgtcagtaataagcagaacaaaaagttgctcagtaattaatcttcatgtaagtgccacagataaatgattgattctttgcacataagtgttttatccaattgtaaggtgaattagatcctggcatgaacatgtacataaaaattgttcttccttgattactagtaatatcatgcaattgttattgcatgatattaaagtatactgatacactgataataaagtattgccaataactagttttgcttttttgccaaccatatttgttttcttatgaggaatactacttttaatgatacctctgaagcattgatttttattctgcctttaagtgaaaccacttattcactttatgaattaaagcattgttttttactttttctaagacaaagacttatctgacttacctaagttgtgactattttctgtgaaaattacgagaacccaaaagaccttatgttactttttgacacattttcaaaatggcattctctgaagaagacaaatagatcaacagttcaataagttttaatattcagatattcatcttatatttcttatttagacatttatttttaggatgcttacctaagatggtcactcttacagaattactttttaaaaatacatgtagatttatggttcttctgatgttttttcattagagtctcaattcacaaaaaaacctgagttttaagtttatatgatttccattcctattttatccctttgagttactcaaccaagatagtgtaatgatgatgtaacacaatatgagaataacatcaaaatggaaaattgaacaatataagagttggcatgcaattggacatacacgaactctaccctgtctactaaatgttaggaaagtaaaacttactactaattttaagtacatgagcaagcgcttgtaagtacccatattacattggtaactcttgaagaatgtagtggatattaataacataagattgtatgaactgtatgattgtatgaacattacaagataatatgaactctaaattatcttatatttaaaatatgttaaatgtttctgaataactttgctatttcatgaggactactttataaacaaactgggaccatgggtgggctgtagatccaggaattggtgaatagtgttacttctccaaattgtaaaacattaatggcaaagccaaagatagtcacaatggatggatacaatatacttctaagtgtgctttctttttttaatgcatagagcttggagtcactccatatttcagaaattttaaggtgatttaaaagatgatcaaatgcccttattagcattccaatggaatatctgcacttggaaagttcgcaggtctagacaagtgatcttctacatgtttacaaattaattttaaaacattttttaagcaatataagtatattctacagtctgtctgaactactgtaggaaagtggaggtgtgcctaataatactcaaatttagtatgctctcaatctaagtaatgactttttaaacaatcttaaacatacttctttaaccaaattcctgattctgcaatatcactctttcagcacccagactcaaatttttttgtttacttttacttatttcaaacattggcagtaatcaaaagtcagttttccttattttatctctgaaataactattttctcagtcagattccaaattcctatgaaatttctgtttattcttgttaccttttctttgtttaactataaataaaaatggccatcctcattctagcctcatgtgacttagacctttgtggtccacaaagcttagtgtatgtatggtgaatgactaacaaacatttggtgaatgaatgaatagatgaatacctctgtttcagatattagtgatggatgaagtttttgttttcaacttagagttccaaccaaatctcccaaatttgtctttcacagatagaagctgtatgttaatcaaggtgaacttcttttttttttttttttgagacagagtctcgctctgtcgtccacgctggagtgcagtggcgcgatctcggctcactgcaagctccgcctcccaggctcatgccattctcctgcctcagcctcccaagtagctgggactacaggcgcccgccaccatgcccggctaattttttgtatttttagtagagacagggtttcaccatgttagccaggagggtctcgatctcctgatcttgtgatccacccgtctcggcctcccaaagtgctgggattacaggcgtgatccaccacgcccggcccaaggtgaacttcttaatgttctctgactttttctcctagtgatttttcctcccatcattgcggaagagtaataattgctctcttatttaaacccctttcaacactttacagggactactttgggcatatattttattataacttctcttcattctaatggacttacttacaaaattaatgacacttgcagttttctcagtaaaatacaataactgatgaccttgatgtgcaaaaattgctcaggtcgttggctactgcctaggatatctgcacatttctattttcaccagctgaatggtatgcttatcaagaataagttatgtttattttcaaatcaatttacactattctaaaatactgtaagtgtgtaatttaatcttgtagaatttgaaaaatgcatttaaaaagtgttgttgtatttataaaaactaagtcaaaatcattgaataaacgtaacaccggtaaatcccccacatagatacatgtacattaaaaaaccataaaattaggtgtgaatatttactttttaaatagttacaaatataaatttctgagaagatactaaattcaggttgctttatatgattcgttaagatatttgtcctctgggggaaaaaaaaaactaaacagaaataatagatgatgaattacaagtgcagctcatgctaaaacattgatgtagcactccaaacaatgaacccatgctggaacaaggcacctaaagtgacatttttatacatgtcatttttattttgtaaataaatggagcagttgaatgtttgggatccagagaagtgtatacatctttcaggaacaatatatgattaaaaattagatttaaaaaatggtattcatatttggcttaagctctacttcgcaagtcagcattttgcaaagggaggctggtaagccacatcatggctaacccttatgatagaccctgattctcataatagtaagaagaattttcccctactttcaaatcataataacatcagaaaaagtgacatgtgactattagaaagattaaaccataagcagtggggcttatgtcaatgaattactctagataaactatgataacctgagagaagtgttagtgctttttctagaaatttatatataatgtaaataaatgagcattagtgtaagaaaggaaagaaaaacaaacaaaataaaataagttcacaagtgaccgaactaaactgtttttagccaaaacatggggaacaacaagagttttgattggcatgttaaataaggaatacaatacagaaattaaaattaaattaaacaaatagtaaaccttttacatagtcaatagattaaaataaataaaaacattaatataaaagtcacccagaccttctcaaagatgatagtaagtttataaaaacaagaaaggcattaagcttaaacacataatttgtataaattatttctaaaatgctatatgcttagtctttaatgtactttagaacttagagaaagtctatcatctgcagatcataagttgtacagctaaatttcaatcaacaattataccaacattcagtatgtatgttgcaatgaaaggcatctgtcctactaatatgacagaagaggtgtttccagccaatgttctccagagatctcactccagccttaagtggctgaaggctttaattcaagcagggaagttccactttcatctaatttatgcatgatacatgaaaaaatttgattaaaatattatttaaaagattggaaaactccctatagtcccagctacttgagaagctgaggcaggagaattgcttgaacttataagtttgggaacaatttcagcattatagctggatcccatttctaaaataaataaatacataaatgaaaatttaaaaaattttgaaaatgtattggaaaaccataattgaatcaaaatttggggaaatgcatgcccaaatttaagaagatgatgttaaatgaaagaaaaaatatgtgtggtgaatataggggaaattatgtggaatttagtatcatgaatttcagtggaaaaaaggtgataaaatgaaaaaaatcttcaagatttagcaatttcagatgaaacaacttggcactaagctaatgcaaagagctattattttaaaaaggctcttaaagtttagaatttgtcaccaacaccactagtaactaggtggggggcggggtaataccaagtgaagagacagtatctttgtgggtattaaaaaagttatttcaggggtttaatctataaacttgaagaattgacagtatgttgaatgacatgtaagaatctcttctttatgtctgcaaacatgctttcttcatgacagtctgtagtaagcagaattctaagatggtctccaaaatttctggccactgttgtcatgcccttgtataatcccctgcccttatgtatgggcaggacctgtgacttgcttctaaccaatacaatgtggcaaaagtaatgggatgtcactctggtgatcatgtcacaccgaatcattttagaaaagttacaatgttttcttttttcttcaagaaataaataattagtagttctgactttttaatgttaagtaccaacaaccaggcttacagaagcagcaaaatgtgaaagctttgctacgtgaaaacatatactaccaatcaggtaaacttgacaaattatactcaggttttttactagaagctgagaggagttggaattgaacatgacctcagaaaactgcaatattcagattggtaaagtagacctggatagtataattgatttggcaaaaagcacacaataggttaaaaaaaaacaaactaggatgcaaaattctcaactttaaagctctttttaaattcaacatggtgcctctatgaatattttatagctatacctcattacaataagtatgcatattggtcattttatttgcatatatgcagaatatgtgtatacattatcatgtggtaaaatgatccatatatggagtaagtagatgatgtaaattactttatacagccaaaccacatctgtcactcaccatttctgaattgactattccaagaacttttaaaacaagttatggcctccagtggagccaacaaccttattttttcacccttctcctggcccaggccacagtagtggaaagaaagccaccaacaataaactggaaagaaacccagacctggtttgacctcttactttctgcgtggctttgctcaaataattcttcctttagcccattttttaaatatgtaaaatgaagagatgatctttaaagttccagctttaattttctatgactttgtagtgtttgagaatttgaaatgatacatttggacagtcttaaatccaagagagatatgaagtgaggactgatgagaaggtgatgagggagcagatctggactcaggaggagaaaaggatgaggaagttcagagtgggtatggctgctgggcctgcacagtctgggtaacatgttgggactgtggctaaaaaagtcctgtgatcagtctggtcaacatagtgagatcctgctgtccctactaaaaaaaagaaaaaaaaatgatgtttttttttttgatacggagtttcgctcttgttgcccaggctggagtgcaatggcgcaatctcggctcactgtgacctctgcctcccgggctcaagcgattcccctgcctcagcctcccaagtagctgggattacaggcacctgccaccatgcctggctaattatttatatttttagtagagacagggtttcaccatgttggccaggctggtcttgaactcctgacctcaggtgatccacctacctcagcctcccaaagtgctgggattacagtgtgagacaccgcgcctggccaaaaatttttttaaatagctggatgtggtggtgcatgctactttggaggctgaggtgggaggacggcttgagcccaggaggttgaggctgcagtgagctgtggttgcgccactgcactctggcgtggatgaccgagtgaggccctgtctcaaaaaacaaacaaacaaacaaacaaataaataaatgaaaaatcctgtgatcatctctgaccaaggagaagcaaatagctattcccaccttagagacaaagaaaccatccacatgtagctgggcttttaatttcactattagctgtatatgaaatattcaattactcaacatttattgaaagataccatgttctgagatttgtgttaagtatctgtctcatggatctccttcatcagcataatgcattatttacctgggtttttgttttgttttccttttcatgttttgcttttgtttcttcttttttattggccaaattgaaaagcagaaattacactaccattgttttgatattaacttatttgataacaattaggagtaatatttcttaaggtttgtcttccagttatattttttatgacttgtctcttttgactattatttgtttgtttatttgagacaggtctcattctgtcacccaggctggagtgcagtgatgaagtcacagctcactgcagcctctacctcccaggttcaagcaattctgcctcagcctcccaagtaactgggactacaggtgcatgccaccacacccggctaatttttgtattttttgtagagacagcatctgatcctcaggctggtcttgaactccggagctcaagcaattcacccaccttggcctcccaaagtgctgtgactacaggagtgagccacggtgcttggtcttttgcctatttttctattggagtattagtgttcttatttgattgcaattgctctttacacatagaaaatcatttgagttttcctaacaaggattatttgccaaatgtatttgttttctgtgtctgtgtaacaaatgagcatacacccagcatcttaacatacattcaccaactcacagtttctgtaggtcggaagtctggcactgcctagttggattctctgctcagggtctcattgagatgatgtcaaggtgttggctggaaatccagttcttttccagggctcaggatcttcttccaagtttactgtcgttggcagagttcatttctcataattataagactgggcttcctactttcctgccagctcatggcccagaaccactctcagcaactagaggccacccatagtctctggccacatggctgctgtatgcaatttacaatatgggtgtttgcttttttctaggccaggcagagcatatcttttcagcttcctctatgtgatagcaggagaaatcactgtgcatttaaagagtttgcctgattaggtcaggcccacccagcatcatccccctttttgtcataaatgtaatgtaattaaagggtgataccatatccacaggttccaaccacactcatggagtggggattatacaagggcaagtgtcattgagatcatcttagaattctgcctgatacaccaaagtttgtgtgtcttactgatttttttttcctaagaaccataacctgttataccaatattgtctgctacattgataattcactattttttctctttatgtatatcttcttccttttttgttccttttctaatttctcaaagatatttgttaggttctttcatcccttcttaatcatattagtaatattaagtcatattaatgactacttggtcttcttccacaaattttgacataaaatgcttttatttttgaaatagctattttggtattttattatgcttttattcaatatttgtttaggaggcaatttcttaattttcaaatggttggaattctttctatcaatttattattaatttcaggcttaactacattgtgactggataaccctatatgccagctattttaaatttattgagctttactttgaactccagtatatggttacttttatagaaatattccatgaacccttgaaaataaaaattttctgtaaatatgttttttgagataatatacagtcatatttacttttgctattaatattatccaaaatctaaatgttgtcatctattttttaaaatattttaccataggctaaaaaagttgtattaaaaccttcataaccagtatatttgcatcaatatattcttataacggttgagataaaagatgaagtggtccaattctttatttgattgggataataacactattattattaaatactcaaaaagggaaggaaaagctcctcttcagatgtgtaggaaaagtccacctctatgttagcacatgaaatacgaattcatataaaattctaaagaaattcaataacggcaaaactaaaatattctcaaataagtatttttacagatttaaaaatcagtaaggccaattaatttttccttttttgttcttagattgaaatttaatttcattttgaaatttgctattcactaataaagtaatttgttctcactgttttagagattaatggaatatttctctttctttctttcttttttttttttttttttttttgagactgagtcttgctctgtcgctcaggctggagtgcagtggcgtgatctcggctcactgcaagctccgcctcccaggttcatgtcattctcctgtctcagcctcccaagtagctgggactacaggtgcccaccactgcacccggctaattttttgtatttttagtagagatggggtttcaccgtgttagccagggtggtctcgatctcctgacctcgtgattcgcccgcctcggcctcccggaatatttcttaaaatctattttaatgtttattaaaccatgaatcaaccttaaattttaccaatttctaaataggctagtttatttaagaatatgtatattttcacacatgaatcttaatagctaaattatacacttatacactgacttgtatcatccatgtatttttggcaggctgacttaatatgtgagctgacagaatgcagagaccacgttgtatatgaagcatccactttgccttgtacaccagggcattcaataaccacttaataactacaaccctgatggtaagagcagttttcctccgcagtggatttatgcaaatttcttgttttttaacaatgctctttactatagcaaatgattttgaccttgagggtaaggcaaaacaaagcaaggcaaagaaaactttcttcaatattctctgagagtaagtgattaaatgctttttttcttgttctctgacttgatcctacaatgtttatatttttatttttaaacttggtttgttataaggagcttatttatagagtttagtaggagttcaaattataataagtaatataaataaatctggaatttaagggtcaaaagcatacttaatatgtggtcatgcgatgtctatatatttgtatatgtatatatgtgtgtacatatatatttaatatatatatttaacatacacatgtatatatttaacatataaagaatattatccaaagtacttatttttaaagctggacaggtactattttaatgctgggtactttactattgtgacacatatatctcctaagtcatgctaaaatgaggttctctacaacctcagaaatgctagtattaatatttcattgtgtacattgtgcactagtaaatatttctattgtacactatgcatattaaaaattaaaatgacccctattaaagactctcaacaaaggaaaatataatatcaatggaaaagacactgtaatgagactcaacatttccacagggcagctagaaaactcaaatattaactcattaattcccacattattcccagttgatttcttcatcaagctgtatgttgaaaggacaatcttcagtgattattcatatttacagaatgtcagttgtttctattctttagtcaaacacttgcccagtataaaagtgaacgtggaggaatacggctctaatatactactctgaattttgctttcgataggtcacacataaacttctgtatcaataattaaatataagggaacaaaagcaacatatttcagacatattgagtcaatagaaaatcatggtaatacaaaaaaattggaaagaaaacaaaaaaattctgaaaaattgcatttataatccccaagctagaaaccaaaatgcaaatcaaatgagtaattttcattgttaaattcattttgccaaattgagcacagagcttctataatgttattttgacattgatttttaatgttaaattataacatacttaataagtgtctactgggcaaataaactgtatatctatataatgaaagagttgaaagtactactgttcagaggatcagagaaacttgagtttgaatcacaatcactggttttatggactttaaccaattattctgacctccttaggctttaggtttctaatttgtaaaatggttcttacttcacatccttgttataaggactgaacaagataacacatgaataacgtttggcgtatgcttatttgataaatggtaacaatttccatcacagtattgtattgtttgtaataggtgtaattattgatatttgaactttttcactaccaaaaatgtgccaggcatcaaaactaggacttgaaaaataaaatagtgaacataatagacttagtatctgccctcgtcggttcacaatcagatggaggatacagagaagcaattgccacacactctaataggagtagtatagagtatattgagaacaccacctagctcaatctaggaaggacagggtagaataaagtgacatttgggacaagaaggatgtggtgggtgaggatgagtcaggtgaagcaggatagagtaagagagtattcctgtcagagagaaaaggtataacgatgagaactgataaagcatagggaattacattgaatgaaagattagtatagctgggtggggaggtgtgaggtgtactattccatgatactgaaggagtcagcggtggtcagttttgcagggacttgtacccatgttaagtagtatagactccatactgtgagcaatgggcaactcctgaaaggttagggaggacagaacggttacgggatttgcattttagaaagaccacctattgttttgtcaagactacactagcgagaggagacccgtttggaggctgtagcagtaaaactggaagatgatggaggtctgacactgggtaaaggccttgggaatgcagagaggtggacaaagataggtagctttggcagtccctagtgatcaattagaagtagtggagatagtactcttgggttccatggatagtactcttcgcagagagtagttgccatctcttagagactatgtgcttaggttggagattgtcgtatgttccttaacccatataacgtaagataaaagtattagatggaaaaatatcagcaaagcaacaagtagatttaaaatgcatatatatcagtgatataattgggaaaaaatggaaatctagaagtaactgcccatcacctatttattcattcatttaataaatatgttgtatgtgctgtggacttaagggaagacagggttagtgtttttcctgttctcaaagacctcataagctaatgatacatcatagaagttcttcctaatgatttggaagactcttccagcagctttaaactcagaaggggatgctccttaagcacaactatcacactctgggagactaagtgctctctaagtagaattagaccaccacaggtcagtgtgggatgcagaagcagatcagcctaaagtgcaggccagtaccagaggaacaggacctttcaggactaagcaggaggactctgaaacactccagactatgctgttaacctatgcccaatgtgcagtgattggaagttaacaccaaatctatagttgacacctgtacctagttcttcaacaaatagtattatttatttcagaactatgccaaagaaagtacattttcagacactattaagatttagtgtagcggttaagagcgtgactctggagcagactatggagcagactgccaggaccaaccacttactgtttgtgtaactttggcaagttttcctttgttcaaaatatgtttatttttctcatcttaaggctggaataacagtgtgtcttacggcataaagactgaatgggacaatatatgccctccaatagtactttgtccatggtgaacatttaaacaatagctgttattaacataacctgaattactaaggacctcacatttttactcattattctagagctcactcatcgcaaaaacaaatgtatttcttttataattactttagtaatgtgccttttttgttcccaaaaggtacaactttaataactcaatttatttaaaatttttatttaaatggaattaagtagtaattttcttgacatcaccttacacttttgaacatttttaacttccaaatagcttttagatcttcataacatttctataagcatcataggacagatatctcatttaataaattaggaaacggggtaatatagatttagcgatttgctcatagtagagttaaggcttataagctcttaatctagtatccatataaatcaaccaaacctcaaaaaattattgggcaactgttatgcacccagcattgtggtaggtgcttcggaggatagaaatgttataaaatactatccaaaaccaaaataaatttactttctatttggggagataagattttatattgtcttttgcatagtcttggcagttttgcccagccttcaaagctctctcagatctgtccaagtcaccattctttattattaatgttcaataaaaattcatgtttctagcttatcattattcctactatggcatgagtcaagaaattttctgaggttttaaaaaacaattcctcaaattacttgaatgtactttgaaggttgaagtctcttaggacttaaagagaggatgaaatgtgactcatgctattccctttcttcttttggagaccaataggaggaaggtgtagaaaaaacagcccttagtttgctctggaatggaggatagttaggtgtgagttcaccacagatgtaagaggcaaaataaatatgaggttccagttcaccacatctcttcataccagtctattcttgcttcctggaaaccaagactctttacctacatctcatcctcagctcctgtgatttacgcccccggaattccaaactactaattgtctccaaatacatcctcttgcttcctgtctttaggtttctgcatgtttgtatttcctgattggaatgccccttagaaaagtaattttcttaaatattttaaggagcttaccatatcaagaatgtaatcaaaacaatttaaaaataaacagaaaatataaaatgtatcaccatccccagataaacttataaaacaatttattacagagggcaaaaggcaaacaacaaaaaaagacaaatagtggagtatgttaccagtagtaattcttgtaagaaaacttactggaacagtgtggaatgcaactggtaacaataataatgatgatttaccagatattctatattaattaggcactgtgctaagtacttcacatttattatctcatttaatactctgtcccagaaatgcagtcagtaacattatgcacatttttgagatgaggaaactgattattagataggtaaagtcacacagtaagcggctaaaatgaaattatataacccagtatctggctccagagtataaccatttaccaactttataactgtggcctcacatgtctaaaaacaaatatttagtgtatgaagaataaacagtgggcacttgtaattttaacacaaggcattaatataattttggaggtattataatgatgcattgtagataagtcattactggaattcaggaatggaaacaataacatgttcaaatgaaactagtctaatagaggccatgaaaggtaacatttttgcatcagtaacatatgtctcaatatgaaaattcatacttaaaggttgaaagtcatacacacacacacacacacacacacacacacacagagacagagagagaaaatcattccttatagcttattagtatactcctttatctagtctccctggcatatgataactgataaataaatgaaaataggcaaaaagaataaaggctaaaacaaaaagaaccaaaatgatgagattaatatactacaggcagcattcctaatgtagaacaaagactcttcatctattggggcatctgctgtcagcttaattcctctaaaagcagaatatctcataatttatgccttactttgatgaacagaatacagtataagactgatgaagcaatgagggcaaacaatattgtgtgggtttatttctgaccaagaagaaaggaattgtgaagtaaaagtgccaggaaatttgatacaatgtggtaatctgtgaaagaatataaaaagaaagccagattcaaaaatgaataaaagaaattgaaatgtatcattaggggataaatagaagtttcagtatttaattacaaaatttcgtctggatgagatacaactgcatttcaacagcaattcatgtggaaaagatgagagattattactttcttagaagggtggtgtaaagtgacaaggtaacatggctaacaaaaacaaaaacaacaaaatctaactcaagtgaatcttgaatctagagaaaaaattggtccaaaataattggaattaaaatgacaatctcaagtatgctctaatcagagaaagtatttatgagagcccttcagaatggttttattaagaagagttgaatgagctggaaaagtttgatctgagtgtctactttgtaccaaacatgtttaagtaggtcaccacataaaaggagagacatgcatgcatataagtagctaccctaaaatatgatagtactttgtaagacgcatgagtcaagaagatgcattatttattactatactctatgccttatatctctgggaaccaaaaaagaaagcaatctgttctgcctagggttaggaaggcttcattatcactaccttcaaaaagctgaaacagtctttctgaagcttaagaactcctggacttcagacactatgcccatgaaccaagtggttgcattctaattagacaaacaaaacattaaagttcagcacaggtggcaaaagcttcatttaccaggacttctccctctgacatgaaatgtgctctaacgttattctgttctatttcattggccgggtgcagtagctcacacctgtaatcccagcactttgggaggctgaggtgggcggatcactatttcattaaaattaaaaaaaaaaactggcctattaaagggatttctcaagtctaactaaactatgactcacaatttgagaagcaccacattaaattatctctaaagtttctattaccttaacatttaaaatttcaattaatgcaatgttccaagatataaaataccacaaagtagaaagaaacagaactacctctagtgcttcagtggatagttgctttataaaaaggttagtgtttcttttagccttgatcaatataaaaaaacaataagagtaagaatcatgtcaaatttttacagaaaatgtatatcttatggatggtctttgtaaaatagtctttttcctttttaatataacagatagcatatggtagccattagtcctcatcaaatgctaaatgtaggtctaaagattcaagacaaaggaagctagactaggctattactaaatttattttaacagaagttcagaaacaattttataaagacaacaatttttcaaaaaattagccttcatctgattccttaggaaaactcaaataaacaaagtctgaactgacataatatccaaattaaaatttctgtaaaaaagtccacaatatttgataaaaacagtctattttttttttgtcctgaatctatttccatagacatggaaatgtgacaggatctatctactattacatctctgcactatatttctttcccttctctcatcaaacaaatctgaattaactaagcagctctaatgctagggtcagggcagctgcttccagctccaatattagccccctactcctaaaagtggaggctgacctagattattcagagactcattataaatacttgaagcatcttttaagggatatagtcactaaatcaaaagaatgtcacatacctgtggtatcttccatggacaactatcaaaatgcaatggacatgatgatatctaatagaattgtatctctaataaaatgtctttaatgtattcaatcctttaaaatatttagactatacagcctaaaagatgggcaccctgctgtttttgagatttccaaacactaaatgggaagtaaaggtgctttgtcctagactccttgttaattatcttatatatccattagacttttaacttaatatttcaaagtaggttgctatggattaaagttttgtctccacaaaattcatatgctgaagctctaaccttcaatatgactgtatttggggatagggcctgtaaggtggtgataaaggttaaatgaggtcatacaggttggactttattctgatagggctggtgcacttataagaagaagaatagacaccagagttctctctctttccatgtacatgcattgaggacaggccatgtgaggacgcagcaaggaggtggctgtctgcaacccaaggagtgagccctcactagacattgatgctgctggtatcttgatcttggactttccagtttctggactatgagaaaataaattttggttgtttaagccacccagttatggtatagtgttatggcagtccaaacaggctaatgcatagggcagtgtaattttagttgaaggagctacaagaatatttcttgttgttaagttctcttcaatgtacatgagccaatgtgatgcaaaaaacaataaacagaacttgtaaacaagggctctaagttcaactctcggcactcccctcactagctatgtgacctaatgctccctaagctaattttcttatctgaaaagttaacataataacacatttctttccaggttattgtaaggattaaatctgatgatgtttgtctatttgttagatcgttcattcattcatctaacaaatatccattactaaggatgagaaaactcacacgtatactatattaccctttaatttatcagtcatttccgagttaaatcttttgttcctcagtgaaataaaattttacatgatgtcaaaaaaatctatatggaaaatatataataataaatacaggcaatataatgcatgtattgtaaatgttcctcaatttacaatgaggttagttcctgataaactcattgtgagttgaaaatattgtacatcaaaacttacttaatacacctaactaccaaactttatagcttaccctagtctactttaaacatgctcaggaaatgtagattagcctacagttgggcaaaatcatctaaaggaaagcatgatttataataaactgttggataactcaggtaatttcctgaatacagtacactgtacggtaaatattggttgtttatccttgtaatcacgtggttgactgggagctgcagcttgctgcccctgcccagcatgagagtatattgtaccacaaattgctagcctgggaaaagatcaaaattcaaaatttagagcatggtttctagtgaatggctattgcttttgtattatcataaagtaaaaaaaaaaaaaaatcttaagtcaaaacatcattaagctgaggatcatctgtatgtgtgtatatgtatatatgtatatgtattcataccttcccacacctatagaatcttacctctttgctttcttccagatccgattcactactaaagtcttccgtgtttaaattttcaaagtcagattctcctacagcaattggtacagtcacagtaagactggggttgtttatgaatgacatgtaatcactttcatcaataatgtatttttcaacactgctgccagttcctataccacttgtagttccatttacatctttaagatagtcaagatctttcccaatttctgctgtatgattggacatacaactgtctttcttgttgtttagatcatcaagtggtttaatttcatctaaaatcttttgtttcctaatgaaggactgttgaataaattcatatatttttcttttcacataagctactcctttgtgcatcctatccacagcaatttggagattattcatttcattatcatcatcagtggctgcaaggttgtctgcactaaatgagctcagaagcaaggccagaaagagattcaggaccttaaaaacaacaaaaacatgattataattttacaccaatgtagggaagagcagattacaatcacttattctttcttttaagtgtggaaaaaactctaagttctaaaacttgatgagaaggaaacaccacagcatagtgattagaagatgggtgatctgaatttgtgactggctcaatagcacatccttggacaaagacatgatttctgttgctctcaagttctcccattcgtaaagtgaaattgaatgagctaatctaaggttttgttaactctaaaattgtatgagtagaagaaaacagatttatatgtgtacaatacgagaattcttaaaaatcactaatgtttccaagtatgcatttaaatgcattctataatttttcaataaacaaagatattaaattggatgtcaattgaaaaataaccattacaactcagaatgaagattaggagcttaacataggctgacacttgttttcttaatctattatatttctcatacttcattgttgactaagtagagctgtttatgaataatctctcatatttccatgagactggcacatgaatgtacatacctttagaatattttatgtattactatactataaacagtaacactccaaatttaagagagataaagattgatcagttactccattatggtaatctcaggcatcattagccattcgagaactgatgaactcaggttggctagtgcatctgccatatgacatagagtgattgaatatcatatgctgcaatggggcaaagaaatggcacaagcattatgaactcttaaagacaccactttttagtcctagtctggatggtaattttgcactttctctctactttttttagacttctctcttccttggctctgaatttataaaatggtcccagcacatccttttaggctcatctcaatatgatactctattgtaattcacataaaaaatgtgataaagtgactgacaaaatagaatttggtataaaaaatgcaggggcactgctatattgctgtgttgttaaagtgataatatatccaaggtaatggacttttaaaccaataatcatagtttgtttttctttttgacaaaacagtcaccattaaattatactctttttttttattatactttaagttttagggtacatgtgcacaatgtgcaggttagttacatatgtatacatgtgccatgctggtgtatttccaaaatgcatatcttaagtgggtacataccactaggtttccaatcaccatgaccatcatgaagacagtaaggcacatggcttgaccagcaacctccatacagtcccacatggtctctatccactccccacacagcacgcggaacacaatcaggaaggagtggaagaagtcattcatgtgccagcgtgggagttgacaatcactggcgatcttgcagacacaatctttgtagcttttaccaaagagctgcatgccgaccacggcaaaaatgaagacgatgatggccaagacgagggttaaatttcccagagcccccacggaattgccgatgatctttattagcatatttaacgttggccaagattttgccaacttgaaaactcgcagctggaaaatgaaagattaatatatatttgtatgattcttaaaagcattatatatattgagctttacctagaaatggtcattagaattcaatatcttacaatatctgatctgccctaaccgtctcaggctcatggctaatttttggactccctaggaaaagctggattttccatattttaaccatgtagatcattttctctgatggtgaattatttttctttccttttctttttttttttcttttgtcacccaggcgggagtgcagaggagtgatctcggctcactgcaacctctgcctcccaggttaaagtgatcctcctgccccagcctcccaagtagctgggactacaggcacgtgccaccacacctggttaaatatatatatagtagagacggagtttcaccatgttggccaggctggtcacgaactcctgacctcaagtgatccaactgcctcagtctcccaaagtgctaggattacaggcatgagccaccaagccaggcctcttatagtgaatttttaatgagtacttggaatccaactgttcttaatttgttttataaaggtggttctaaggccggatattataatattaacatctgaatctgaaatatctctgctgaaagatattaatttgccagtagtgtgcaaagtaacatcatactgagccctgatataagtaaagtgttcattattcattaatgctccttaggggtattcatgtagttacatccacctgcattgaaaaacttggaatatttcctataattctacaattattttcctgacttgtaaggatatatgtgtgaattaatgggcatgcttagtaatcctacagactttctctcctttgactttcgcaagatgcatattttccagagacagaattagaaaaagtttctgcatgcacatcttacatctgattttcatccactgctacaaagggctatatatattttcaagttactattaaaaggtgatgcattttcattaaaaatattttcttaggtctagaaatattaactgtagtagtctctagaagcaatacttagtgaaaatagcaactgagtaatacgttaacttttacgtaactatgttctttgaaataaaggttttcataaataattgagaatttttttccatgtaggaaaagtttttgacaatgcaaatgttacagaaaaacttacaatgctaatggttgtgtggcaaaaaaactatgacattgctatgcaagaaccctgattgttagaaaggtttttgaatttggtgctttttttttttttttttaccaatcgaaatgaacggagaacagataatccttccacattggcgagtccaagttctaccaggctaagcgtcacaataaaaccgtcaaagatattccagccttcttggaaataatagtaaggatccatggcaataattttcagaaacatttctgctgtaaagatcccagtgaaaacctaagatcaaaacaaaattaatctaattccaccagataataacatacatgacataagatttgctcttagaacataatgcttatgctattttcccacaatgattctattactaacttaaatttgtatggcaatttgtagttgatgaaagactttcatatacattatttaattttatccttgtggaaacgcgaagtagataatatacaattattactttacagataaggaaactgaggtcttcagatgggtgaaatggcttgcttgatatcatacagcaagaaaatggcaaaactaggatttgagtacaagtcatcttttttttttttttttttttttttttttttttgagacggagtgtcagtctgtcgcccaggctggagtgtagtggtgccatcttggctcactgcaagctcctgggttcacgccattctcctgcctcagcctcccgagtagctgggactacaggcgcccgccaccacgcccgcctaattttttgtatttttagtagagacggggtttcaccatgttaggcaggatggtctcgatctcctgacctcgtgatccgtccgcctcggcctcccaaagtgctgggattacaggcgtgagccactgcgcccagcccaagtcatctatttttaacagtgctctttccattataccaaactacctttttgtccagactttatataccacaagtactgacaacattttgcccatgagcacttttatttatctataagcttattcctatttccctcaatcagagttatacattcttatctattatactaggtgcattactattgtcattctttgttatgcacatgaaaaaaataaatttacttctgtagtataaatagtagaacttcaaaaatataactaataaaatgcaggttgttatgcatgatgcttttgttttctaccatcaaaaatcctaaacttcaaaccaaatattacaggaaatgcataaattactttagatagctctttccttcagcaaataaaagctagtattcctaagttgagttgactggcaaacactttaataatttatgtttttgaagcacaaaaaggaaaaattaagtggcaatcttcaccaaaaatgacctttgtaatcatataacacacaaaatgtactggaagttttcaatagttcatggttttgatatagaatagatggataaacaatacatgtactacttagatcctggaagaggaaaagctggagacatttttgagttgttaaattatttcttgcagtgatgatgactaagaaggataaaagagatccacaattttattttaatcttctacagtaagggaaattgtaataatatctcaaaaagtatgttcttaatctatgagctacttctggatcctgaaaaattataaatattgctgttgacttttcaagtagtgctgtaggcctatgcctttctcagtttttgtgagcacattaagggtgattatttttggcaaaaaagtagagtatagccagctaaatataattgcgattttgcaggggccaggaagcatgaaggatggttgaaagactgctatacacaattaaatgtaaacagtttttcaagcagaaaatttgaagactaaacacatttaccttccaatatgcttaccaagtttcctactgtaagcacattattgaaatggtccgtcattggatagtgctccatggccatgaaaagagtatttaagacaatacagatggtgatggccaggtcaacaaatgggtccatcacaaccaggttgacaacatgtttcacttttaaccaatatggagaacagtcccagattaagaatatgttggaaaatttataccaacagggtgggcatttctgcctggattcttcaagttctagattaagaaaaaaaaaaaaaagaaccaccaaaaggtatactttatacacacacatttatttcatatccactaaacttattttcagtaatcaacacatttttgttacagagacaaccttttttgtacttgttaaaaaaattacagtttactctaaacctcccaaggatatttcatcagacacacacatagagcccaggtaacaatgggtagttttttgtcttatgcactgacattgtggctcagcacttggcctcaagttaaatgagtggtctttcatgtgacgtctcaatgggaacatggtttagggtggtgtagatattgtgtgtgcaaccctatgtgaatgactctacattgtcaacctcagactatgagagctagaatagggattgatgtgacccaagaatcatctttttagcttgtttttattttgtgaaaatgacctgctcttcctctacaatcttgagagtacttaggatgaggctgaaaagggctgtactgctgaagtcttaaactaatggaacaaaaagagggtcactatgactaatgagattagaaacccctaacagaaatgctttgttctgcattttcaaagagttgctacacagttaggaaaacattcttagtcccaatatcactcattttaaaataaattgttaaggcttctagaatatctgagtagatataagaaataacagctcttgaattagactgtcttttcattagaatgcactattcccaactcacaaatatatttgtttgaaatgagacaatataagtttggtgaaaataattgaaacgaaaatagaatttgttaccaaccttctactgtatttgttagaatgctggctatactcattgctcgttgcctttgggaaggatcttctagaaagtccatggaaacgtggaaagaacttgaccttctctttctcatttcagtttcagtggttgttccctgtaaaaaaaaatgctaatgcattaaacaattaatttgagcaatatgacaagcaaacaaccaaatggtgacacagtgaatttcatgaaacacatgcatcatgcactttcatattcaattggtgatggcagatatttctgacttattgtatcattagcctggaatgttcaaactgttaaccatttagtcatacagcaaaaaccaagatgttaacttcctgatttcataattttataaaatacaaaataattttaatatagttgataaaactcttaagagatatatttaacagttattacccttatttctgaactaatagtaaaagcctagtaacttaaaagtcctacaagtgatcaaggcacttgatttttgagaaggtagctatttaattttaaggaagtataaatgattgcaacacacttagctgccatcttattttctggacacaagatgtagatggtcattgacaacacaaactctatgttaaaaagaacacacacatgctgcatggacaacagtttcatccagggtaccaaagcaataagtcatctaattctgacttagtcatgcctcctcatgctgatatatttccaagtgagtaaacagtctaagaagaggcagcatctgtttagaaattcctcatctgagtatacatccacaaacacataacatacctttgtacacagacaattattttatctgtctgtattaataatgtatttgtgtctcttcatttaattttgagaagacctatatcagcattttttagtaagaaaaatatgagtactaggagtattaaggtaacaatgaagctatctacttaagcagtgtttttgaaaatctaaactaaagcagagatcttgaagaatccattggaaagatttattacatacccttgacacttaaacatagaatcattcatttactttcataccagagccttggagaatgtcctgctatctaaattcagtgtgggtatatagcaaatcctccaactggaggcagtaattattgtgtctaatcaatccttagcacttttaataagtaaatgcattcaggtttgtgcaggagactgctaaggttttaagttttagttggttagtctattaaagatattacaagatgcaggtgcattcacagcgtgaccaaccaggaatcattctcaaggttgccgttctgtagaaacactggctggtgcagcaatagtgagccagccatgcctgaactatttaaaacttccttacattgtcatcagtagctggcttatctattatcacctctggcagaagctgtccaacaggcgatgtaggaactgaaggtccaccaaccaaggaaaccacaccattgcaatccacagtgctgtgcatcttcccattcgctggaaacactgccagcatccgggatgacctactggtctgactcaggttgctgttgcgtctctctccgtgtcgtcggggcacaaacaaggaatctctacggctctcgttatcctcaaaggtgctgtgctcatcatctgcgaagtcgttctcagatcccacatcctttgctcgccctctaaagctgaaaaggcttgttctgctatttcgccttggtgaaaatagggagccacggatgctcaacaaagactagaagtttgaaagagcaaacaaataaagtcatattaatatggacatttgaatgtgatttcattttgcaagattatgtagaaggagatttcagcattcataacagaatatggttcattccttttgattatcattctcattttatgtgcattcacattaaattaaattaccttgataaaagaaagtttctagcccttgggattaaagaatgaggagatagattgcaaccttaacatattgaaacacacacacacacacatacacacacaccctgaacgaccatttctcaagttcaaagggaaacatccttagaatatggcaatggacgtggtaaacattcagtgaacactggcaccatgaccttaacaaggccaccttggtttttatggatcttgtctttcaaaaactttcaacactcctcacaatttactttagtccacctttctaaaatcactttaattattatttctttttcacctataaggcattgtattgttggaacttgaagttcatacttctgaaattcagagtcatgtgccttttgatcaagtgtaccatgactaatattttcagaagcatgcatggtgacttataaagaagttagggggaaaaaaaacataaaatcataaaataacctaaggacattcctgatcgactatccggagttccacatttttttttttcttaaaagtgctgaggatcaaaaagattaaatgtcattagttatagacaaatatcagcagacagtatcagaatgacagtccagttctcctgactgtcaacttggtgttatcttaactacaccgagctgtagacttacatatctgtggagtaaagtttttgcataactatgtgaagaagggatgggtttaaatataacacaacagtggttgattcagttgataaaaattcctgagtccattttctaattctccccctctctcccatgttttaattttcaaccatgcatcagtaaactcagcagtgccatacctggtgtggggaggagtacctcttttcatatgtcaatcggttcccttcaatggagaagcgaaaacctttcctcctgatgctgtcctcagattcagatttttggaattcatcctcatctttctcttccccaccagactgctctttctgttttcttttcttcctccgatttcttctttccttagcactcttggaactcaacttagaggcttcagatgagctgtctgagagcctgcctgctgcactgggctctctggaatgttctgaggcagttgccgttgctgcctgctatattgaagagaaatgattttaacatagcacctgaagagactgtatctttctttgaaagggctgaagtatttgcatggcttttaaaaaatatattgaactgactgaagatcatctcacagagaagattctctgcaagtataagaggagattttttttttctttctacctaatgaaggcttttggagataatttagtttgctccatggtaacatttattatgtctctgttaatgctccacagaccacgtattcaaaaatatccaacatgtatcaacaagaaaataaattcattactttttgggatttgatttactttaaaaattggtatttaattagtgttgttttcttttctccgaaaaagaaactcgagtatggaagaaaagctgatgagtttaaggcaggggaatgggataaggacctgaggtcctttctctagttattgaaattggattgtccaataccctcaaaatattattaatcctatttatggacagttataaaatccctttctcacccatccacaatatccagaagaatggggaagggagaatcaatagtttctgctgagcaagataagacatccagttctccaaaaactgtccccaccatcttcaaatcagtactggttcttaaggggcacatgggcatggaataaaacaatgctttttgattatagcttgtactggtactaagttgacacttttttattattatcattgttcccagggtaacctcgataaattaattactcttgcatataaattaatatttctgaaacaactttcttctttagtaaagacaataagtttgtatgctaaacagaaagatgagagagataggagaggcattttatgatttatcacactgtgaggactaacacttcactataaaaacaagtaatcctttttagatggtcaatctgtgtaagattggtaacattcatatgtctattggatgctgctgtatcagagatcattatattatttgatcacttccttataaaggtaataaagcaaccacgttaaaagccaacatatttttagttaaagaaaaaaggagactatgtttaagaactagaggagcaactcttcatatgataaccaataatttcttgttctaagaaaagatgatttcctcctaatgccagtctactcattgaataaaagtctctcacttgaaaataccccaaaataacattttccctttactttgagaatcttaagatgattaaaatagcatgagagagttctattgtggttattattatacacatctcaaataaaataattaaactaaataaaagtaagtggatcatcaaaatatagaaatcattattaattcctcatacaaccacctgctcttaggtactcactttctcttcaatattacgtaacaatcagaacgataaaaggtcagtgccatgagacagggcagctttacctgagctgcctcctgttgctttttaagctgttcaatcatctgctgaaattcggcctctttctgttctgcttcttccaaggtggcctgattctgttcctcgtaggccatggccaccacagccaggatcaaatttattaggtagaatgagcccaagaaaatgaccaatacaaaaaatatcatgtacgttttcccagcagcacgtaatgtctgcaaacaaaaatatcagaattatttctcaatattatttcactaagtggtggcttcaactttcaatttactcatgtgtctagcaaaactcagatataaatagtaattatgttggtcatagcaccctgtactttttttttattgtttctttaacttcagcttcttccttctcttctagcttatgcattcacactatgatttctatggcagaatttttgtattcaccaagaatgaaacagtcaataaaatgccatggagtcctccattaacgacctgagcctttaggaaagtcaaggaacagaccaaagttatctttctatatctgctttttcattttcattacttcccacctgagggataatatttgagggggtagatagggctgaagggagaatgtgccttctgtttaggacaatctgtgtctgagaagggtagggaacaggttttgagccaagaagaaatgggagagaattgcaatccttggcatcactctgctcagtatgtgttataatcaataggatagaggaactcaagtctcgtttcaagttctgctctttctactatattatcatccggttttaatttcataactcaattggttttcttgtatacttttacttaaatggagagtgtggctctttagttctcaccagttgataaagattttcccagaagtcctgagtcattagtcgaaacaaggacaaaaaagcccaactgaaggtatcaaagcttgtgtagccataattgggatttctaccagctttcacacacatatatccctctggacattggctgcaagtggggtaaaagaaagtattacaagtcgttctgctgcctttttactctgatactatgctatgatattgcctagtcagaaagatttggtatttcaaaataaaagtttgacaaataagtaactaatctatttcccaacttttgactgcatatagtcttattagctacttggtgtcatcattaaaatatggtgcagcatttctaataatattttacaaaataatttttgttgataatttgcattttcaacacctccatttcatttttactactatggagtctccagagtttatagctcaatatacttatctaaaagaacaacattgttattattatatactcctaaaaaagtaggaacaggattactcctctttttgtatgtttgctgttatatacagtaggtgtttaatagatatttttctctttttttatacttttatttgaagttcaggggtacgtacatgtacaggtttgttatataggtaaatgtgtgtcatgagggtttgttgtgtagattatttcatcactgaggtattaagcctagtacccactagttatttttcctgatcctctccctcttcccaccttgcacactctggtaggccctagtgtgtgttgttccctatatgtgtccatgtgttctcatcatttagctcccacttataagtgaggacatgcggtacttagttttctgttcctgcaatagtttgctaaggataatagcctccagttctatccatatccctgcaaaggacatgatctagttattttttatggctgcatagtatcccatgatgtatatgtaccacattttctttatccagcctatcattgatggacatttaggttgattccatgtctttgctattgtgaatagtgctgcaatgaacatacgtgtgcatgtgtctaaaagtattacttcttgttttagaaaacataaatcttacctaatatttacataatctcatactttatcaaaaaccttacatatagcaaattaatgtcaataaaattagttggctgttatcttcagtttctataaaaagagagaaaagatacacatatgtatgtgtacatacaaatatacacagatacacacaaattattgacttaccctgcatcagagctatttccacatagtagtgcatctaaaaaaccctccaggaaataatgatatcctgtttgaaaaaagaaagtcgtatgatgaacatttgcattgttaaaaacactcaaatgagaacaggaaggtcaggttctacttttaagtttattgagtaattttaaatatattattcattcaaaggcacaagtatttgtctcttctccctctaaattctagatattctattagatactttacagtgcaaagtatttcttcattatgaagaaatgacattagattagatacagtgcaaagatactttagacactttacagtgcaaagtatttcttcattatgaatgtaaagttagtgataatgacaggtactaacataatctttcaaaaaggtattagcatttgttcaccattctcacgaaaaaaattcattcagtaaaaatagacaggaatgacaggaatttctttgtttttgcaaaacagccacatatttcaaaataaaagaatagtatattttctggtcctctcgcctatatttttaacactatacattttaataattaagtataacatattctcacattttgcagaatataggcaacttatagtaaaatatgcataaatcatatcaacaactgaaatgaaagcaattttaaaaagtcttaaatactaaagctaaaataatgactataggtgaacactacattatctcaaagattcctgtttcttgcaaactccttggcttcttgcaatgtccagttcttctataactttttccttggtattttcaactttctttctactaaatattgacataattaagaactcccctcactgtgctaccagtaacctgtatatacttgaattattcttaggatgacactactatattgtaattatttatttacaaatattcctcctagaaagtcccaatcattaattatttctatattagtgtttgtttgagaccgggtagcctttctgtaaagtttattgaatgaataagtaaataaaagacaaaaagagaaaaacatggaattaaacaatcaatgttggattttgtaagaagatatattttctagatgctaagttttctgaggaatttattccatacatagttctgtacaggacacagaagcacataaggaaaaatatcatttttatttctaatattctgacttccttgaacctagacaggaaagttgacatagtatttcctaactttcaattaaaattaaacaaagagaaaggactataatagtttctggatgaatttttgatatctcatatttataaatgaagttttgcccattaaattcaatgatctaaccttaatgatcagccttaacctgaggaaaatataatttttcagttataatagttacctttaattttaataaatttaattttctattattttcagaaatgaaccattttatttatatttgcatttggtttaaaataagaaccatagatgtttagagctgaaaatgacctcagatattattttacttcgagtattggaaaaatgcagtccaataaattttccctagagagaataaaccctaaataaccctcatagtcagtattttgaacttagataaaacaaacaaacaacagatttcagggagctggtgattgaagtggacctactggcattcgtatcaccagctactaaggaggctgagatgggaagatgccaccacacccaactcattaaaaaaagtatatatatatatatatatatatatgtgtgtatatattttttttttgtagagaaggggtctcactatgttgcccacactggtctcaaactcctggcctcaagtgatcctccagcctcagcctcccaaagtgctaggattataggtgtgagccactgcacccaactaacattttctattactgtctcctgaagctttattaactgtaattttcttctttttaatgtaatactactttttaaatataagaataagatttacttttaggtatcactttatttccttaaggtaataaaataatctattaaactataacactctgaagccatgcattacctccattattttccccagtgtactatacagtttctgatacattaaagacattgtgtaattaatgtataatgagttacatttgcatagtattgtagaattcgcaaagggcattcacatattttatctcctttcattatatcaatcaccacaggaagaatgtatagcaaccaaggatcctaggaaaattctttctagctgaattcttcagccttccaaatgatgataaaatagaaagtggcatttaggagtcaaaactagagtagttatgaacaaagttgttaaatgtatgtggaagccattgataaggtgattaacaaaattcttcttttagttccagaaatataaataatctattatttaaaatccagggggtagaaataccaaataaaatataattttaaatattgttaaatagtttgattaggtaattttctaaaagatcacgtcttgttatgtaatcatttaaaaatatttttcattcctagatggaaggcacattagcaatgaaaagaccaaatatacatgatagtaattcttttttagagggtgttttatttatttcattagttttaaattttaaattttaatttttgtgggtacatggtaggtgtttctatatatggggtacatgagatgttttgatacaggcctgcaatgtgtgctaatcacatcatgtaaaatgggatatccagcccctcaagtatttatcctttgtgttacaaacaatccaattctactttttaaggaaatgtacataacaataattcttacttgaatcttgaatatatgacttccagtcaaactcaaagacagtttcatttataagtgtaccattataattcacagttatattcttttctatactatgttcctccaaggaagcattggtgggaggccattgtatacatttattcctcaggttgcccatgaacagctgcagcccaattagagcaaatacgctcagacagaacacagtcaggatcattacatctgagagcttcttcacagactggatcagggctcccacaatggttttcaggcctgaaagaaagaagtctattactatgaagacttaacacgtgtgaaataataaaagcttcacacaattttcttgaaaacatagatttcattcataaatccaagaatgtttgcaacgctagtggagaagcaacacttcattgaaggggaagaacttatgaagataaactccagaaatgtaatgatttaaacaatgaaatgaagattcatatcccattatgtcgagatagagtaatggaaggttcatgttcttcatggagcctatattaaggaaagggccttgtctttttcctttttgctactgaaacttgtctcatattttcattagggtcagaggtcagttttataacaaaatacctgaataaatattttaaaattcctatttataagtaggaaagattttgctgtacaaccgaaaatggtctgcagtataattgtgccttaagataataaatcctccatgcagactcacactattctttattgtcttattcccttctcttttgttagcaaaaaacttagaagatttgcattgtatacacatagtcattaatgactctaatgaataagaaattacagattggtacatttaaaagggagcaaattctcgataaaactaacatggtgaaaaaaaaaaaaacccatgatatttgtaagtgcaggtcaccttgacctcaaattacagtatctcacataagacattgttaaactccaaggctgataaagcttatgtctaaacaataagaatcattttctttgaaacacctagtcttatgattcctgattttctgtaaaactgaatgtcaagcagagaaggatgctgaatcacatgatgggtccgtctcattatctaaccttgctctcacctggaatgactgaaatcgtcttcaatgctcggagaactctgaatgttctcaatgccgagacattgcccaggtccacaaactctgtgacgtacctgtaatagggagttcacacacaaacacaaaaacaggacacaaagaaaaagctgtaggtacaaagagcctatcctttactctaatcacttcttacctggaattaccgaaatagttttcaaagctctcaagactctgaaagtgcgaagagctgaaaaattgcctaggtttacaaattctgttacaaacctgtagaattaaatcagaattattcaagattttagcaggatttatattacttgcatgggtcttttataaagaccttcttggtgattttaaatgataaatattataagtggtaaatcaggaattagattccatcattaatctttgttcacataatttaaggccattagctaaatgtaaacttcataaagtagacacccttgttgtcactctggaaagcaatgcaaccaacatcatgtgtaacttgtaaaaagaaagtaaatcttggctatggtttagggttttagttagaaaaaaatatatgaaatcacccaacagaaatttaggcatgaaaaggcagtttgccttactgcttttatatatgagataagattttcctagtgtaacttttaaataaaagttaagcaaattaagaacaatacttgatgagggtccaatgctgcgcctattgttactgccattttgttcttaagaaatagaagtcctgtaggccttcttttgagctgtgaccagagagcctagcaaagaattggctcatcctgatcagataggaaattaagaccagacattcggagtcctgagtgtatcagtgccacctctcctgctcctatccactacatcacaactgttagaggccaaaaaatcagctcctgaaggaaggatgagggtaagtgttgttgggctgcctccttctacactctactttcacttagtctggaatggttttctattatttttctgggtctcttcctgaggaagtttgccactagaaaaaaaagcattggggtgcataaactgtgcatattactgagtggatatgaataggagataaggataaggaagtttatgttcagactaaagagatgaagagagccataaaaggaaagaagaaaagaagaaagaaaaggggtcaggagagaaacagaaagaggcagagagaatgtattcctctacaggtcttagaaatcagtaatttaatatattaaaaacataatatttcaagtatcttctttcttctcttagtttgatttgtcagatcgttttgatgctagtagatacttactttcaattattttaccaaaccaataaaagaagctgtgtgtaatatcagcaaggtcattgcaaatttgtgtagccaatagaactgttttgtggctgtaatttttaaagttattttcacagatgtattacaaatatgcttgtgttttgacattagattgtgtgtgttcatatgtgtgtgtgtttgtgcatgtgtgtgtggaagagtggcatatgtgaaattttctgactgatgctacgtgtgaaaattgtagttttcaactactgcaaagccttcatgctatagtgaaattccacttagacctttgttgtgctaaattgaaatccagagtttgaatgtataaatcacaccaaaatattctacaggtaaagcaaacctattcttaaaagcataagcactgatggaaaaccaaactatgttctctcttaaagtttcaaaaaaggcacttacgcaaatgtaatgacagtgaaatcgagccagttccatggatcccgaaggaaagtaaaatcttctaaacagaatccccttgcaataatttttataagtgattcaaaagtatatattcctgtgaaggtgtatctgaaaacaagcatccaaaaaatttgataaagtaacagtgttttttcatagcataccaatttcttatcactccatcagtggaatagataaatactaaaaaagaaaactaagcagatggattttaatttcatacaaatgaaacgtagccctaaatttaaattcagcttcctaacacaaagagttgtttcgtaaagtgtcttaagagtagtgtgagaaatacaaggtatatgaaatctatttagccattgtctgaaatgtcttggtatttatgtaaatatagtctcctgagaaatatttagtatgtttacatgatggaatagccaatcaataatattgcagaagcatgaaatgattttcttttagggaaaaaaatctcaagtttaatagtgttctaagaatgagaggaaactgacaaattagcacgtgtttttttttttctacaagataatttaacttgcttggaacaaggacttctttaaaatcaaagtaaatacttctagggttataagaagtaaaaatttaatttagaataaaattcttctgataattcagaaacttaggtgtttccaaagtttaaatcttctactcagaaattggggtgtgagagtggcataaaatcacaagaaaactagggcgactgaaaacctgtggggcctcccatattagcttcaatactttagaatttttttgtatataaaatttattattttcttcaagatgtcatgtttcttattggtttcagcctggaagtgtctaggaaaggagacactcttggaaataggttggtgcaaatgttggtggacactcttggaaataggttggtgcaaacattagcttcaattgaaggtaatggcaaaaaccacaattatgtttacaccaacctaatacttctgtagttgctatgggtcagcagctgtatagtaacaggcattacaaataggaagtgtgggcaggtgagcagctatggttagagtagcccaacttcagttatcacaaatctggcctctgtgcttcgaaggtatccccagaacagagagatcatcaatatagttagtaatgcttctggtttctgaaagctctacaaaaagttccacttctgttagtttagtcttcagtctactgaattttcaagttctacaaccctgaaactttggattatttttcaatttgttggtgaccacgcttggaactatattggcctgacatgaagtgaatgtgcctgatggaaatgaaaactttgcgaggttcaatgttgtcttcacatggcatttgtaactaaccctttttgattcttgattcaatgtatttatctggaatttaactggaaccaatgtctaccatattggctcttttctgcaattgctttgaccacatttggtttggctactgtagattttaaagaaaaaggggtaaatgtccaagagtggtggtcttcaggtgaacaccaggtacaggcaaaagagagtgataatcagtataacgccagcaggcctgagggccaatgagcattgtcctcttgctgcgtaattttgtctaggaatgactttaataaaatgctcttcagttttattttaagactacattaagacacagtttcaaaatcccaaatgtatatatgttattaaaaatataagttgaacttactctacattctttgtccaatcaggagggttactcattgtcataaacacacagtttgtcaaaatagtgcacataattagcatgctgaataatgtaggttattgttaaggaacacacaaaagaaaatcaaaatccaagtgttatattacaaaaagctaacattgaaaagcccaaactgcagcttagccaaaattcagggataaatgcattgtgggcaagtcttctaatctccttacatttcaatttcttcatgtgtaaaatgtgggtaataatatcaccttcactgagtatttgtatagattaaatgaggtaatgtatatgaaagcattatatcagtataaggtgttgtttttacaactattattaaatcaatatattcacctcccagagaacttcagtgggaagactatttttgtgctacctggagttgcacagtttttcagcagaaagtattgacttgagctcattcaggtgaataaactagtaaattgttgaggaaggccacttatctgcaatattgtaatttcttaaacacatcttatccaacacagttcaacgcatgaaaacaatttgtagtcaaagtacagcacgatgctaattgttgggttgctctattttgactgagtttatacaagtgcagcaggattcgataacattaaaagtgaatattcttgaaggttgacacttaacatgatgggaatgtaattaaaattcaacatagcaaagtgatgttggccaagagactcaacctctctgtgccattgccttgtatctcttcctacttctctacaatggagctaataatgtactcattttgtaatgtaaccatttctacatgcagattaaatgagttaatgtattggaaatgcttggaacagtcacggtacgtaagtaaatatactctaagtggtagctaaaacaaatgaacagacataacagaattataaaactgaaagggaccctaaaaattagtttatcactatattttaaaaatcagggaaataaggccttactaagctctagaggaatcagataaagggtccaggactagaatataagtttcctacattaagatccaatattctttccactatagtttactgccaaaacaaaaattttccataattgaaaaagaaagttttcatcaaatgaccacatgatggcgctaggaatacaaactgggacaaggaaacttccctaagtataaaaaccctatcatatgatttttatgtttcaaatcttttaattttagtaatagcatatttataccactaaagaaatttcttgctgtcatattaaaattagaatggccgttcaaattttagaatcctttaaaaaaaagtatgagcttatgataattataatggtattttaatatctattattgtcaaagctatcaaacaagatacaatcagaagtgaattgttttcctaaattgattaacaaatgaatttagtcgtggagtcctttttaacaccaatgggaatcatgaaaccaaatcccttaagaccatttggaaatatatgccaacttctctcattaacttccggagtctttactaagcaaacagttttgcatggcagcatcataactcatgacttgaatttgaaattcagccaatattccagtacttccttcacaaaaatcatcaggaaatttcaagaattaactaagtactggccaaagactcctgacattctctgacagaaaatatacttaaaggtttattctaagatacactgaagtgttttatatcataactatggataaacttgagtctggaagtagatttttctgttatcatatcattgctcactgaaaattctacaccatcacaaactttgtataaagatggtagaggtaaacatggttatcttactttagatttgtaggattcaatacatataagtgtttttagaaagataacaaaagtacataaatacatgtttatatataatatataaaatgttaaagagtacatgtttcagtaatgtctatgtgattaatgaactttaagaatgaggctaatatgacaaagatgcaaaatgagagtgatgaaaactatataatatggacatttcccaacttaatttgatatttagctataaagtgcttacagatcatgtacaaatagttaatattaatcacttgaaaaaggatatgaatgtaccaaaatcttaatagctattttcctaagaggattgaagggagttaaaatgtacagggcagaggtggcactgaaccggaagatggccttccctttattcaatactataaaagtctgtaagacaggaacacaacatagaagtatgaaagtataaaccacttaaactctgttatctactttctgttacttgtcataataaattattgtaaagttaaatgagaaaccagcacaatcacaatttctaaagtgccccatgaaaacaaactgtcactggatctcttcttaattagagaggaaatccaatgataccacttaccttttacctaatacttaccctcaattttattgtacataagacaattagccaagagaagtcatttattttctcgatattttaagtgtctgagttaaatgaaagtcttaaatgggtgcacatttcatttcattccaaaaaacttaaggcactacatgctttttatagtcatttcagctttcccaattcaaatatcttgaaaattaatcctgtggaacgcaaaatcattcaacagaactgatactatttttgaaataaagattgtttttaccatctatcctcataaaataaacattatcactctcttcgtaatagaaaataaaaacagccaccatcaaacccactcttgggttagatggatgtaatccaataattgatttctggaggccaagatccctggagagtacccgttgaccaggagtgctaaattctgtactgggatttctgagttagctgacatattgaattctaatcccaattgacttcctatcttatgcagtgctttcttatcacagaggagaagctccaagctcctgaagaatccaggatccatgaatgtgaatgaaattccttccaaaaattagacttatttgagatcaattggcagtgggcagacaaaacattaaagaagcaacatgtaagggtataaaaagggctctgactcaatgttttccaaggtgcttacttatatttagacagagccagggagaaagcctttatctctgtgaagagcatatttggggaaggaaattttaagcttcttgattttaaattcacccattcttcgaaagctttcttttctaagccttaggatgcatatctgcacagatcatgttatgatacagcaagcataaatgttatgtttattttctactaagaatctttgtatagtcttagctcattaacagatttcccctatacttgcaggattttctaaattcaagtaaagcaaacccaccctcccacacccctacctgctaatggagttggtttttgaaaattaagcactttctatctggtatgggtagaagtgtcctaaactggctgtgaaagtatggtcccccaaccagtactggttaagtatagatatggagagtccatgtttagaaatttgtaaggcaatttggccaattaatgttgtgtctgtctattctaataataaaaaagtagggggatgttgttgtgggcctgtttttcatttcagttttctagaaactaatttttacttcattttatagaagaatagagacctcacatcctcaacagagtttgagaagcactgctccaagtctcacctctgcctgcattccctctatcatctttgaaggagtatgagtccagaaaacagatagagctttaccacaaagcgcatttgaaggaagggagaatttcacctgtgcttactagaagaacaatcccctatgccaacaatacttagccctctttttctctgattcattgagggattctgtccctgaatgacattgtgagatcatcgtaaatctgaacagacttgtgcaatgcaaatgcctttgctgtgggggaatatgagcatgtaacgacacagaaaggcccaaagtgagctagctcaggaataaatatggtccacctttcaaatgtactgcatatacttcctttccccccagatatgctgagtaaaatctgaaagaaatattaggggctcagatggccagtcgcagtggctcacgtctgtaatcccagcactttgggaggccaaagtgggcacatcacctgaggtcagaagtttgagaccagcctggccaacatggtgaaaccccatctctactaaaaacacacaaaaaaattagctgggcctggtggtgggtccctgtaatcccagttgcttgggaggctgaggcaggagaacaggagaatcgcttgaacccaggaggcggaggttgcagtgagccaagatcgcgccactgcactccagcctgggtgatgagagcaaaactccatctgaaaaaaagaaaaagaaatattaggggcacaggtaggagaaccagtaaaaatataacacagaatatatatattttaaaataagaatctcttgatttcagataatattaaaagctaattttgaaacaaatagtagtgatacaaagagataatgagaaagaaatgacaatccatagatggcctaaatcatgggctggagtgtgaggataatcaagatggtactgtttgtacctccgtggataaggaaaataaccaggctcatcctaaggagacaggaccatacttagaagagaacacctgtgatgctggctccttggccactgttcagcccaaaccatgaccagaggtaataaatgaccaaaacagaaaagacagacaaggagtggtaaagtaaaaggcaaagctagagatctaaaagaagggaggggaaatatttctgccctgagtactaaaaagtaaaagaggcaagattcagaaaccaaacacaaaaggttccaaaaaggaagtctgcctagaagtaaaaagagcagaggattctagacaaaaatcggggaaaggtggggacagagagaaatctgttaaaggacacaaaattacaactagataggaggaacacattctagctctccacaccactgtaggatgactacagttaaaaataatttattatatagtttcaaatagctggaaggaagatattgaatgttcccaacacaaaaaatgataaatgtttgagatgacggatatgctaattattctgatctgatcactatacatcatatgtattaaaaccactatatgcttcataaatatgtacaattattacgtgtcaatttaaaaaataagataaaaggaggtataaagggctgaaactaagtaagatgagtttaatgaaaccaaagcactctcaatgttggtatgtgattctaaatctaaaagtcctttgacatagagaaaattaatactttgacacaaaagttaaaaacaaatgggcataattatcaattgttcaagccttagatgaaaacatttactgattttacagtgtattccctttattcattttaaaaatttaaagaatgtgtagaagattatttggtaacaagatttatatgtgcaatggaaaatacttgcaagttgaatttataaatggaattggtaaggtttttactgaacaacggtatttgttttgctttaatttttcataagacatactgttgtgcaagacatccttgctacccaggaagctaacaataaggccaacattaaaggaccattttttcataggatttcttctgtgagaactccatttttctcagattgaaacatacatgcttatgtacaaacttcatagatgtagctttaaggtattgatggattttaaacagccttccaataaagcaacagtacccagacttgtatagcaacccaatatgtataattttaaatatgatagcactttcatgtcagagtaagttccatttagaatgtcagtcttattatatgtaattgatcttatgtttgtttatttcctcaactgtctgtatcttacctccttgtaattgcttacatagccaagaagccgatcattcagtttataagtgttaagaattaataaaaggatacttgtttccaaggactctcagatacagctttctcccaaaagtggcattgatgatattgaagggagggaagagtctgaaggaaatactgtttgcttacaacaaatacttaagtagctctagagttttcaaatatataaatatttgccttccccgctatacgtataagaaagggctccaagagggaagagttcaaagactagctaagatattgctgtaccttaaactgtataaacaaatattgtgtagctttaagctaatcaagatttatgaactattaaattgggtgactttttaaaaactttttaaaagaatgtattggttagcttattatagtgaagtatcttagcatcctttaaatctaattagttcaacaaagatttcattaatacaacttatcaggataacttttattgcattaagtcatttgaataaaaaagaaacagttcaaagttggtggtggaggagaaaaggtttatacagtagtatctagcccaaaacaaacccctttttaccacccaaggctcataggaacattgacatgactggctccacttacaagcagcaagactttgtggtttagtacaattcaggcacatctatgactattcttaatatttgtccttcagttcattttagtgccaaaacaaatgctttaattgcagttctacaaagaaatagaactgtttgaaattaataacatcattttaacacgtggataattttctgcttcaaaacaaatgttgaagcatggcattgtaactgaggtaacaactagattttatatatgaaaaatcactttacagacttatttgcaggaatgtaacattcatacaatagggttgttctagcttgtcacttatgtcttcatatacaggtaccaagtttattgggcatatatacaataagttggtaattatgtatgagcagggacctagtttaggtccaattgttaatttcaattgatggcaattcagaatacatgtattaactgtttagtacaatatttgcaatgccctgtgctacattctaaagagaaaacaaagatacataggttatgacaccaagacatttataaactaggagatgctcaactatttgttttaatagaatatagaagaattgatgaaggttaccttgaccagcactttccaacagaaatataatgtaagctacaaatctgagctacagttatgattttaaatttcctgagagccacattaaaagaaaaacaaagcaggtgaaattaattttaacagtattttctttaacccaacatatctgaattattatcatttgggaatgaaattgatataaaaaatttttgagatatgtatatttttatactaagtcttagatctttgaaatatggagttacacttacatatttcaaatactcaatagctacacaaggctaattaatctctgctatattgggcagcacagacctaaacttaaaccatccattgttcagcaagctcataccttcttcagcaatccttgccatgtaaaaatcatttctggttttaaagaaaaagcaagaaggaagttatatagaaaaattggtaataaccctggtaattaacagtttaataatctgggaagcaacattatgaaaatataagtatgatttgttttatcttatgttaagggtgcaaactctgaaattagatttctgattcaaaagctaactttgctgccttccagcagtgtgatccggaacaggtttcttaactttctgtgactcagttatctcacttgaaaacagaataaatgtacttagctcatagaggtaatgtgattccaatttagctggtcagattttgatacctagtttttatactttaaataagtaatccagatgattctgtcatagcagggctgttaatatgtttgttacctaatggttgtaaaaaatcacaaaccattggccaaattatcaatgattatgttgtacatgtggattgaaatcttgccccttgatctaactgaatagttactaagaaaataattatgttataatgatttggtagaaattgctatttatgaagctatatttgttattatctagtaatcttttcttgtttctgggcttatagaaagtgatttgtttacaattttttcccaggatggacattgaatttaacaagccatggttttccagtttctttttctcatttaaatatagccattaccttaacatttatttcaatctaggggccatattcttcaaagtacatagtttaaacataagctgtaactttgtgtttcatctaaacattattgaaacattgccaaataacaggactgactccaaatttattgcactttcctactcttaaagtaaatctactggcaaaaacaagaaataacacaggaaggtgagctatgatgatgaacaatacacaaaatgtagaatatactactggttggttaaatttatcctttagcttcaaagtttgaaacaggcaatttccaacttgtacatgagctgtgctccagaaatgcatttggaagtcaattgtttggaaatgtgaacatatattctcacagatacacatatatttctagacccacaggtctatcaaactgttaatgaagtacaattctgaatgaatggcactgagaaactttatcactatgtgtaagaaagtgttactctgaaaatggcagagttctgtccttgaaatagcctggaagtcagaccaggaaaattatctggctctagctcctacccagaagtgctattaagtttttcatagctctaagctgctggcttggaaagaggttccagcatgaagggggagaattagagccatgttgcaagaggagagatgcttcaaagttttgggtgtgaagagcagcatagatggtcaggagattccattagtataatacatatctctggggacatttcttatgctgggtcaattccatggtatataatattttttccccaaggactttaaatggtctcacctacttcccttctcatttgtcatagcctgtgagttcaagccaagcttttcttccttttctggctcactgggggatgaaaagttttcttgcaggctttctacctgactctgaagagagtatgccatatttaatattttttcatctcctagtctcattcaattttttccttccaaccagtgataaccagactaaacaacaatctgtgtcacttgcctacccgtgggccaccaagctttaatatatagccttcacttaatgacagatgtggtccttaagccacagattacaaactaaaatgcccacagaggctaagtgacaataggtacctgccagttttaggcatataagtcagtgatgcctgaactcatatttcaagaggaatccttagatgtataattttatgagtgtgtgaaagattttctgatttataaatgccagaaaataattcaaaattataaataattttgttagtttaacaaaacatgtctgtggactccatgcctcacagtcagtttttaaacattgttgccatatgctcacacaaaagagaagaatttgtacctagagaagagtctgtaaaattgcttgttcctatgctttagctgggtggagggttggggccagtggaggagataactctgcagaaggtgcctccctagaaagtgcctaggtaggcttttgtcagccaaggctgcagagccctcaacctcttctccagcagagagaagaaattataacaacaaggaaaaagaataaaatctggagctgaaacatttttcagccctatatcatcagaatgtacataccatgggtctgctacactattatatggtcagttaatttttctttgactggaaagaacacttttgagcccagcttgattacaagcttgctgtgtgagaactatgagcaaactattcccctcaatttctccatctcaatggagaagattatactaataccaatcttaggattattttgaggataaagtgaaataaaacatgtcaatgcccttagtgaattctaaagtgtcaataaaaatataaggattaaaatatttaaaatgcgtctctgtattctaactcttaaatatacacatataagaacatttctgtttctccaaagcatggccaattttagtattggaattttcaggttcagtatctttcttctcaaacttcctatctaagaaaatgaggccatcagcttccttctgtctgacacctaaacacctccaaaaccaattctgactctatccattattctccatctccattgtcaaaatgctagatcaagtataaaactcctaaatttctccatagagaagttgagtgatttttaacaatgtaaagtggaccatgttactgctgtacctaaatacttgttgggaattcattttgctttgaagataaccttcaaactctttaagatgtactgaaagatcccctttatctagccccaggtctacctccccaacctcaccttattctcttcttacctattacaggtcagcttgattatatgtcttattctatgctgttctctttccttggaagattctcctctccctcctcctttttaaccttcagatcccaatttaaatgccatttccttatagaggcacacaatttaaatttcctgaattgatcctctttgaaaataggtgcttatcaccctactggaatttagtgggaaaaaaaatttctaattattttagaagctaatctagatcactgagtgtctaagattttagtttttcctttgtcacctccctgtctctgtctcagaaacagtcccaagatggtgatgttgataaaaatgaataataataataaataaataaggttttacaaaggcaggaaatggccaagtgttgaaatgaccagtaagggttcgggaaatactgccggcctgggagaccagaatcacatcttgcaaaatggcatgagtaggaaacaggaaggacagctataggcttatttagattccatcactgacttctcttttttttttttccactgctgtgattagtgctatgactgcaaatccaaactaacatggcaatgggccatggaaactcactggtctagttttaaaactagtcttaggcaagttatttaaactcagttttattatttttaaataaagacaagagctatcttgaaagaatctgtggattaaaaaagaacagtaattatactgatattatatatagcatgtagagtacatagcttttttttttttttttgcctgcttaggacaccttttctaacagttcctcttctcttccttttggagtaaatctctgccccactgtcttcccatgtggcttggtggagctgacccaccccttggcaacacaggttagtatatgacagagaccatcccataccaaggagaccatcacataccactagccaaagtgagtggttcagaggaggccatgtgacctaattagactcaattctaggacaactgctagagcttttgaaggaaacctgggccttttttctttcttctttcttgttttagcagaagatagtagttacaaggctgtaggatgttagtttagcaccactggtggctatttctgccatcttgtggaagagccagcctgcaaatgaagccagcatgggtgacagcagagctgaccatggaaaaggagtaccctcatgacattgtttgaggtactgggtattttgatattaaaaccagattcactagacacatttcctttatttttccccaaaagttgtttctgttgggttttggaaactttcagttgaaggatctcctatagatatggcagatactctaaaaatgccaagcatcattttattgatcaacatcaccatcttgggactgtttctgagacagagacagggaggtgacaaaggaaaaagaagcacaaggaagaaatagtgcatagggaagagaaagattgggaagtcaactacagggtcctggatgtaagggagagtctgggtgacttttagttttacaggagctgatgataagcaaagaacagctacacactggggactgcccatatgacaattcgtgaaattataagcttttaataatcatcctcttttctgatttcccgttaattacttttgcaagaaaaactccataattccaattaaaaacaaaacaaactctctccacccaatttaacaactaaaaactcctttggcagtgatagaccaaacatgaatttgaaatcacaaattcatatatgacttctcatggagcccaagaaaaagggagtgtgcatcttttcaggacagttgatagcaagagagaataagttacttttaaatgatccataggactttttaaaaatgaatgcatttctgcactccataattaacaaacatccatttttactacagatctaaaatgtctcattctatttccagtaaactgtcacattgttaaaatgatattttcttccatggtaataatgattcgtctgtaattttaacaagaacatgagaaggaagacattttctgtaataaagagtgggtaaagaatttgaatgtagggccaaatggtacaaaatcagcccaagctatgaaaggaaactgtgaaaaaaagtcccgtgagggaaaaaaaggtgtgttcacaagctaaaatgtgccttgctacacagctaaagtaaataaacaaacaaagggaaaccaatctggaatcatgttctaaagaccactgagtcagagctaacatgatatgaaaaatactgtcaccatattatgatagcatttttttcccctgagtttttaacctggaactctgaaggcttaaaacatctgaggatctaaaaaccttctaatgcttctatgcatcaggaatgttcatgatgcatagatgctactatttctttagttactactacaatattactgaacatggattaaactgctttaacaattttagtagaatatttgaacattacataatttgcacatcttaaactgggacaaagaggataaaaatatgtgggcatatgccattggaaaatatactctcagcagtgacattttaataagctcactgacactgcctttgtaaaagattacagagagcttcagtgtggtggttgtgttttttctattcacataaattccttgcatgtacactactgcactttaacataaaatataacataaggaatggattctgcaaatatttttacaattggcttgttttgtctattccatatagttgagaaagaaaccagagtctttgtatactgatgcaaatgacacattaactattgtactagagtccaactttagggaaatcactagtctaactgcatattccatttcactcaggcaaatctaatccacacccccagtatcagcattagtggaaaatctcgtcctaataaacattttccctggtgacatttccactgtttgaccatttagctgtgtcaagagtactgtgtatgtgtaccgcattgttttaatgaagatcacccagccaatctcagataacccagtcactaaagtaaaattagtcatcgaatattgaaagaaatattcattatttttaaaaggttcagattttgctaagcattccaactttagtcagagcaaattaattccatttaaggatatttttcaatactgaaataatccaattagaaaagaaaattaaaggcagaaaaaagtgtacaggcaacttataaaagtcttaagacataaaaatgcagaagaaggaaatttcaaacacataactcaatcatgtgttctaagcacaccatgttagtttttaaggatttcagccctgcaaaaagcttcgtgtgcattgctgttgaatgacttacatttgaagatttgcttgctgtcagttcaatgtaaaagccatgagtataccttaccttggggaaaactctttcctgataacaatatttcccttatcaggttgttctacttgcacactgtgatttgctccaaaatgccaaaatgcttttctttcctcataccatgtgcatttgaagataagaacagaagatgttaagagcaagtttagacgtgagcctaacaaagtttataagggtttcctcgacacaagaatctggctgtcacttcatcagagttggcctttcaccctcagttttaagatgtttcttttgagtattttgaaaatgtttgcacaattttgttttacatctgtctttatatcctttgctatatataattcattataaaccaattatggaccattttgtttagggacatcccctcgagacaatcacttttatcagtctgaaagctctttaattaaagaaaaaaaagattgattggttgttctggtttccagatgaagaatgtctacctttgtcaacatgcattagtttggtctttctcaaaacattcatttattattttacaaataaggacccagcataggagcagagatactaaatttcttccctgtttgattaagggatagatgctgggtggctttaataatttttagatggtgattgctaccaaagaggtgaggacccggtgtctgggggtagcaaaaggcctgttgaggatggagcccactaacatatcccaagagcagcctctgaataaactaaaagtatccaatggctataaatacagtagcatactctatactgtgaatgaatttctgcctggaacacatcagtcttcacttcaataccgaagtcattttaaacgaattaaaatgtttaggcaattggattatctgcatttttacttttcttatacaaataaagtccttgtagtttgtttagtttgggctttggcttttcagatacattaatttccaaagagttgattaaataataaagtgcaacttttctcataacttaaatggcagttatgagattaataatctcttatcaactaagatttgacaatatggtgttcaaaagcaaagttagaggaaaatgaaatacatggaaaatgatccatcccttcctctactgtaaaatgaatagatcagtttttaaaaaggggaaatatgtagtgattcctaaagtaaatcctagtaccactgtcaactgataattttaaatgtaatttagatttgtagatggtgtaacattaaagttgtataatgtttaaaaaaaaaaaaaaaggaaaatactggccgggcgcagtggctcacgcctgtaatcctagcactttgggaggccgaggccggtggatcacgaggtcaggagatcgagtccatcctggctaacatggtgaaaccccgtctctactaaaattacagaaaattagccgggcgtggtggcaggcgcctgtagtcccagctactggggagactgaggcaggagaatggcgtgaacccgagaggtggggcttgcagtgagccgagatggcaccactgcactccagtctgggccacagagcgagactgcgtctcaaaaagaaaaaaaaaaaagggaaaatatgttatacttaaactgactatatcctgaaaagttaaaaaaaaatctgaacctaaggctagtcaaccttttgtgacgctctttcctccgaaactgtagctgtcaatcggaagtgatttataaaactgcctcaaattcacatattacaaatgccaaacttttgcatgcatttggcaaggactaacttcacacagaactgggccagaaacagagtccctaaaagtttagggggtattttaaggtccaggtccaacaaaaaaatttacttaattacaatctttgtgccctacctttccactaagattcacaaatgcattgtgtcaagtgataaagaagaaaatgttacgaatcacctaacgtcatacatttaatttaaaatcaatgcaataatcttaaaaaaaattttatgctttttgttttggtttggtgaaatgacagtcataatgaacggttggatgcttaacataagattcatttcaagcatggatatgaaaaaagcacgcattcaaatattgtttataggttcttcaggttatgacatttttgttaattcttgccaatattagtacattaataccaaaatattaaataacttgtaaaattctagtttatgtaaaaatgttattttacaggtaacaaaatttcttcaggaaattaattgatttgttgtttataacatgacattgaaattgcaaacccttgtggcatcaaatttgtttgcatgaaaaattagtactaatattttgtatagtctttataactcatgattttgagatttccaagtatttccaagtacagaaagtacaaaaaaattgtatagtaaatcgaatctgtggagagaatctgtcaatttgttaaattagctgcctctttctttccttccttccttccttccttccttccctcccaccctctcttctttcttttttttttttttttttttgacacagtcttgctctgtctccaggctggagtgtagtggcgtcatctcggctcactgcaacctcggcctccagggttcaacaagggattcccctgcctcagcctcctgagtgactgggactacatgcgtgtgccaccacgcccagcaaattttttgtattttagcagagaaggggtttcaccatgttggccaggatggtctcaatctcttaacctcgtgatctgcctgcctcggcccctcaaagtgctgggattacaggcttgagccaccgcacctggcctctttttatttgtcatggtgcatttgggacagttgcatatgttatgatataatcaattcatttctcatgtatatgcataaaccacccacaaatgtgtttcatttcttaaacagaaggatacttaagattttgtgctaatttggcatgtgttggtgctacaacagtccaaggaatgcagtaggcaattagcagcaaaatatgcctgataaaaaacactcactttcttattgatatagtaggggtccaggtcctccaggggctctgacaccatctctggaggaatgtctccataaataaatggaaggttctttccagcttccaagtcactatttggctttgggccattttcgtcgtcatcttttttgtctggtttgggattctttgccttttcttctgcaatgcgtctttcaatagccgcaagagattctctggtgaagaagttgaagctgtcaggtcctggtggtacaagcactgtttgctccatcttgtcatcctgcacattttaattaccatttattctgcatatgaaattcctaaaataaaaggaatacagatattttaaagagtggactaagagatgttaatataaataaattcttgtcatgaaacatgagctagaggatttaaagtctgttttctccttaaattgaaaggtgatttctaaagaaaaaattttaacacaaatggtttctgtgttgagtttagttaagcatcacttatttattaattcttgtgctttactgatacaggaactgtgccatgagttttaaaagtggttcaaatatggccttaatcaaagtacattaggctaattaacactatatcactaatgagttattcagtctgtgacacacccagaagatggagactgtgcgtataaaggcaaaggatagctcatttaacaaggatgaggggaaaaggaattgtctctgagaggacataaaatctaaccctctaggtctgacaagtgattcctggccaagatagtcaggatagtttgcagtgaccaaccttaatgaccaatcaaatagttattgctgtcttgactgggctttaacctcttctaagatttgagacaactggaactatgtcctgctcacttcactagccatgcatggttggcttacttgaacacataaagataaagacagtccacggttggacaaatgtcatttatgtgagtaagaaggagaggaaaactaggctgtaaagaaattgctagatggaggtgggggtggaagaagatagctgtaggtgcaggagacagcaggagtctcctgtttcaagaaaaatgatcagaaagaagtcagggtgccataaactcaatagaaactaagtgtttttcttcactgaagcaataatgaaattcttgctgattctatagtcctatagtgctaaccatattatgaaggcctgaggcaaaaccgtcaaccccatacagcagagtcagacctgatctgatgccagacgccaaatcccaaatgtattgttttaaggcatatttaatatgagctcagatttcacagatattactgagccaaaatattccagagcctaagctgccacttggccatgaattttatttggagactgcattaactcattaaggtcagcaagctatggtacagttaattatagctttggtgtatatgaactacaataagaaaattgcaggcataattattttgtgagggacagagacctcaaatttcaaggaggttctcattgttgtgaggtttataaccatatttttcagagtggatgatcaaaagaagggaggactcaagtttaaatttgtacccttagtctactaagtgaagttttcagcggttcttagaacttaacctgcagttatttagtacctgcaagaataggttgtctgtaaatcaatgaaaactgaatgttctgtctacaaactctggttcccctacaaggcatcaggaaaatactaacatttattttttgcaaataaaagtttagggataacaaatatagtaacttttctcaaaagggaaataaaatattctgatgtatatatatagtttttatttttaaatagctttttgatagaaaatatatgtaaatgatataaatgcaaatatctaaaagaaaatgcagtataatatctcctttttaccttgtttccccaggcccagttccccttcctagaggcaactactactacttatctcccatatatatttccaggtattcaataggtatatgctagaacatgagtgtatgtatacatattctattttaaaatacatattcaaatggaatcttattatacaaactgttttacaccagcattttttacttaaaatgtatattagagttcatttatcttaatttttatagatttgactcgtacctattactggctacatgggtttccattgcatgttatgtgccataatttatttaaccaattccctgaatgtgagtatttgggttgtttccaatctttagctaatattgaataaagttgcaagtaatacatttttacacacatactttcaaatatatgtggatatatttataaaattaatttttaaaggtagacttggctttgtacagaatgtttatttatgatagttactgcaaaactactttctatggagtttgtatgaacttattctcctgacagcaatgtaacagagtgcctatttatcctcaccaatataatatgttatcatatttttgatatttccaatctgacagggacaaagatgagagcatattataattttaatttgcatttgtcttactatgagaaaagtggaatatatttttcttatacttaagaattattttttattttctttcctgcaactgcttatttaaaaacagcccattttttccttctatttttttcaatctatagcatcttttaagacaaaatattagccacttgattttttgatgtgtggtcttttaaaaatgtatattttttgactttatggtgctttgtgctacagattttaaaagatttaattaaaaatgttaaaattgttaggtgattatctaattcttctttggcttctggatactgtataatgcttagaaaggcatccagagagatgggcagtaaggggtaggaaaaaggatataaaatatatacatacacacacatgcatctgtatcacctttccctcttgtatttttagtattttggtggtttaatgttataagtttaaatattttatctatttggaatttattttctatatggagtgaggtagagatcaaagaacaactaaataaatgcagagacagtccatgtctttgaataggagtgttcaatatatcaaagacactagttcttcccaacttgaactaaaggtttaatttaatttctgtcaaaatcccagcagttatttgtggatattgataaactgattttgaagtttatttggaaaggcaaaaaacccaaaagagccaacacaatgttgaagaagaacaaagttggaggactgacactaacccaactttaagacttactgtaaagctgcagtaatcaatacagtgtggtactgacaaaagaatagataagtggatcaatggaataggatagtgagtgtggaagaaggcccacataattacagccaactgatctgtaataaagaagcaaggtaataaaatgaagaaaagatagtcttttcaacatgtattgctggaataactagacatccaaatgcaaaaaaaaaaaatgaacctagaccttatgcctttcacaaaaaataattcaaaatggatcacaaatctaaatgtaaaatgcagaactaaaaaactactagaagataatattggagaaaacctagttgactaaatttgttgataactttttagttctctgtttttcttggaactgtctcatcttcatatttgagttctggaatatttctggtgatattctcagtgctatatatttgtttttggttttctaggagtgatggtgaggaggaattgtgccagcttgcttcttcactgccattttggaaccagaactcaggtgatgactttttagatataacaccaaaggcacgatccatgaaaaaaaagaattgacaatctgatatcattaaaatgaaaaattttgctctgtgaaagatactatcaagagaataggaaggcaagccacatactaagaaaaatatttgcaaaagacatgtctgataaaggactgttaccccaaacatgcaaaaaattattaaagctcaacaataagaaaatgaacaatctgaataaaaaatgggccaaagacctgaacagacacttcaccaaagaagacacacagatggcaaataagcatatgagaagaagatgccccacatccatcatatgtcattagtgaaatgcaaattaaaacaataagatagcactacaccctcattagaatggtcgaagtccagaacactaacaacattaaatgctgatgaggatatggagcaatagaagctcacattcattgctggtgggcaagcaaaatggtacagcaacttggaagacagtttagcagtttcttaaaaaccaaacatactcttaccatatgatccagcaattgcataccttaggatttaaccaaaggagttgaaaacttatgtccacacaaaatcctgcacacggatgtatacagcagccttattcataattgcccaaacctggaagcaaccaagatgtccttcagtaggtgaatggataaataacctgtggtacatccagacaatggaatattactcagcattaaaggaaatgagctatcaagccatgaaaagacatggagaaactttaaatacatattactaattgaaagaagcaatctaaaatggacatacagtatgattccaactatatgacattatggaaaagacaaaactacagagacaataaaaagatcagtgattgccagggcagtgaaaatactttgcatgacactgtaatagtggacacatgtcattatacatttgtgcaaacccatagaatgtacaataccaagattgaattataatgtaaactatggactttgggtgattatgatatatcaaattgggttcatcagttgtaactatatacaatacctaaacactgtctctaaaatagctcttgaatcaaagaggactttgattctaatacatataatatagcacatatgttaaaatatacctatatacaatacaggtatatttgaactgcgtttaatttgttaatttagggaaaaaattaatttttttcctaaattaattttcttccattgtattttttctcttctaaatagattatttttacagtaatacatatgtgctactctggtgcgagatattgatagttgggggaggctctgcgtgtgtagagaaaggggaaactctatatttttggcttaattttgctgtgaatctaaaactactgtaaaactagtctatttcaaagagaaaaagtacaatggaagaaatgtttctaaatacaatgtaagcattttttaaaagctttgaataaaccaaaagtaaatataaatggatggaaagttatatcctattattagataggaatgctatatcataaagatattaattttccctaaattaataaattaaatgcagcctttgaaaaataatcacaaaattcatataactagagaaatctatttgagacttcatgtggaaaaataagcaaacaagaataaccagaaaattcttaaaatgaattttggtttcaaagtcctcactgatgcaagaactatttaaaagaaagtgtttaaatttttcaaatgatagattttccttctaagttttaaatttatgtttagttttattaccctatgctctgataatgtagttcgtaccatttctgtttcttggaatttattgtgatttatttttatcctaatagaggttgtttttaaaatgacttttctaagaacattaaaaagaaacttattctttattttaaagcagtagagttcattatgcctcaattatattgatcttatttcttatcttatgtagaccttctatgtctgtacatattttttttctacttgactgttccaagttgggagaggcaaattaatgtctatttaatgtgtttttatttattgtggtttctgtcatttttgttctatgaattccaatgcggtattgtttgatgtgtagataacacttatgatcagatctttggagtgaattgaaccctgtacttccttaaatggcccttgtttatcttactgtagtttcttccctttaaagacaactttgtctcatagcatataatgactttaatttctacttatttgcacttatctagtatgtctttttccatcaattcggtttcatccttttcattttactgttttagcactttccttaatatgtatatgtttagatatcatatataggtatattttaacatatgtgatcattacgacaatcaccgtctttcagagtgccacacttgatgttattgtccatgaagttgtgtgaatggacagaaacagttactaaaagccttcctattctccagaaatactgcatttgagaaaagctctctaaagaaaatctccctggtcactagctatcatttactggagaaataaacaaccaagaaagtagaagacatgaattctacactgacaaatatgatcagttcaaacgtattatatataattataaattagttagatacaggaattatattcatatgtaagcaatataacccatattataatgaaatcatactgatactagaaaaagtatttttttaactctaagtagatcttctattcaaatgctacctaaaaataaattatgttatattaattataagaataaaactcattaaaaatctcataaggttaattatgaaatacctaaaaaactgtcagatgtcattcaatattaatattttttagtaatatgaaaaattgttctaaattacatttgaaatctgtacttattctattaaaatacagaaataaatcatgaattttccatttacacttacaaaggagatttcacctctttattctaaaaatttataacagaagacttaattgtcctaatttatgaaaatacatgtcactagatacggggtagtaacctcatagaatctgcagttttggcttacagctttctcttttcataaaaaccagcatttaaatatttggttacatagaggagaccttgctcctttcaaaagaggtaagacaatgaaactttcctaacaagagaagacttcaaagagagaggccttttcaagatgattatggttatgcatttggacaaaataaaattaagaagagaactaagaaaccatagctaggaagaaaaagtaacaaagtgcatgttagcaaacttcaaatctgaaggaattttaaaaaatattggaaataagtagagtagtgggcaatagaaaactggaagaagaatgattctttggaagacaagaaaaatacattaaaagtggaattcaattagataagcaatcctaaagaagacaggaaaaaaataatccaaaagaacatgaaatggaagtgagagatcatgggggaaaaaaaagattgtaagaaaatgaagtggaaattttgagtggaaagaaatagtaaagtaatagcaataacatgaccaatatcaaataacgtggacaaaagaattataaggaaaaatttgttagaatatacaaataataaataaagatataatatcatctggtaatatctaactgaaagaaaaagagggaggtaaatctgtagcattataattaacagattaccttctcgggagactttacaagatcagaaagttaatactgataatattcagtgtcatttctaagactttactaattcattacttatcataaatgttctagtactagatgaggtttttgcttctgggcattatatatctctgtttcccgtagaagaggacacatgtattacgttctggacttgaggaggcatttatcacagccaaaagatgtttatacttgaggtgactgggagtggtaaaccatatggctttggtgaccctcaaagtgcagatggaggagctttatttaaagtaatcctaacccatgaagccttacagttaaactcccttgggcatctgcttttctccagtcaaacaaatatgtacgatagctcacaatgaagtatttcattttccctgtggcatttcacacagaagtcttaactgtaaaggcaaccttataaatgctttgtacccgaagaaactggccttttataagtaaatcattatgtagtttcttcctttggagggcagctctgtgtgactgcttgggcctctgtggttagatctgtttggttaacgggcttttgggctttcacacaaagctatactctccacaaacttctgtgagataaaaaggtgatatctgtcttagtcctctgaatattttttctttgttcagaacctgagaaagatgaatgaaatttagtgtttcccatccccgagagacacccagcatccacaacttcacactctgatgccattgtgtatttatgcaagaaataccataactaaggtaatgtcttgagattttttggttcaataatgtccttaaattctatgttgtttttaaagcctaaaagaaattccccctcctcactcccccgtctctccctacaacctggtgagacaattctctcattttctcctcccagtttccaatgctattgttatgatctattagaataattgctattatttttttgccttatctgaccctagaagtgatttacagggaaaaaaattactaaccaattgattagtgaactgaatataaagtgcagctcttatggtttattcacagacaagaatatatatagtacttaatgtgatagtattttgttgttgatgtggaacagtgttagtctataatacaggctttcaggcagacaagacctagtttaccttgacctctggacttctgaaaggttgagtaagttattttaagagaattagacaaagataagtaaatcaaaaccaataaatggcaaagatttaaaaaacagagattagtctattcctctcatttaatagaaaacaaactgaatcaaagaaaaatgggcaatttctttgtttagaacttatgtgcttcctactttcaaaataaatatgtcatttgtcccaggttacgcagcttattaatggtgggacttaaatcagaacttttattttctaactcccaaaccagtgtctgccaggtcctaatagttatgaaatattcttttaaagctaaataaaatatatgaaaatataagtagctgtgttaaaatagtatttatctactctaattgatctaggtctctccaaggaatttatattacttggacagacccaaaacaaatacagtaaataaagcattctggcaaaaatggagacttcaaaattttgaaaaatgggagactccaaaatttaaaaagatgattgtaatattcaagtttagaatcatatgatgcaggttttaatcctgctgaactatacctccaccgtcaatttatgttttacttccgttatgttttatgtattgctaaactggattatttctagttactaactgagcagatgactttatataatttatctgtaactccaaagttcaatatagttgtgcaacatttatatatcttcaccaccttataatatataatctgatgtggagaaaaattatatatcttcaattctgtctataaagtagtttaatatccatactgaagagaaaccaaaaagacttctgccaaaatgcttgccatctccttgtaaagagctattactattctggggacataaaccatctgggcacgacaatttgtgaagtgtttcagttcgttttgtagtgttcttgccacctactttacaaaagaatgttactgccaataataataaaaataactaggtaaaatgttattcttactgttgtgatctcacataactattttttagcagccaagaaagaaattggtttttacatagaaatcccaaacctagaaagtattgttttataaatttcttttctagaaataatttgatttggtgtaattataattacaaaaatatttcatttgatttctcaataagccaatttttagtaggttggggttaactaaaacaacatatttcagccatatgtttaaaacttttacatttaaaaataacttcattatctacccttagtttttcatgccttatgcaaactgcagttaaaataaggtcagatatctaacatatgtctgtatctacatttgtatactccaggggtgtttttcaagacaccctaataataaactaagaagtaaaaaattcattcaatctacatacaatacatagaaatacaatacatagtttttgcctgagattcagatctcaggcaaaaaattcattcaatctacatacaatacatagaaatacagtacatagtttttgcctgagattcagatctgccatagtttattaggctctgcctgtagttttctcatgaaacacatcagtatcattaggatgattaatttcatttttttccttacagagaagattgtcattaaagagtaagaccatggatagttcacataataaatcatgtgaaatttaggatctcttctagacgatcatagtcagaataatttaagggaattcctttgaacaaatgtcattagtttatatcaagaatatagtaatgactgtcattgtaagtaaattatttaagttaacctcttttagtaaagttttcctgttagaaaataagtaatcttattgtgtgggtgagtggtcactcgacagagatttgggaggatgtagagagtgaagtctaatcctcgtgactgtgattgtggttgcagattttgagataccaagtgtgaggtgataggcacttaaagcccagtgtgggcctcccagggctgtttagctagcaatgagagaggcactgcctatatccaagttgtatatggcaggttttgcacaaagtggattactcgaagagaaagcctaatggccagtctattcatcttcccctttctcgatgttcatcttttctctcccagctctcctttattctcaattttctttttttttttttttttgctcagcctccatctcacttccgttgctgtcctctccccaccccttcccactctggactgtgcctctcctttgtagacacttcaagtccattctatttcattcaaaaaccatggtctagaagtaacttaatgtaaacccacaaagatggagacagaatgaatgccattcttcttgctgctctctcagacaatgcaggtcatttttgcctatggtgctggtaaagccaggagttatgtagctataagtagcagccagaggaaatagtgcctgagtcagcaattgtctttttattgctgtggggcaataatgggagaaaaaatcaggcttggtacaattccctttgaaggaaaaagatgccaacactagcattttaacacaaaatgctggttgggggttgggaggaaggatgcttacattccttctttggaaatatctactttgataaccattttggtaaaataatgcagtgttttcagtgtgcaaatcctttcaggactcatggttgtatggcagacgcacctgacagcaataatttaagggtaccctgagaatgactctgtggtctaaaaagaatgtgtgtttggaagtctgaggtaagaaatctggctggaagtggccaacctggaaatttgctccttattattaaggatttccaaagcctggtccattcctcagaatgtgggccatacagtggatgaagccctttgtttggattaaatgaatgttgctaggtggagagtgctaagtgaaaatgctatataaactgcatgctttttacaaacattagtggttctcccatccagcccactgccactggaccacccctgtatatgagtcctagataaatcctatgtctcccttgctggcttcaagtctcttctttagtctcttggccatgatgccatccctattggactcaatggtgttccagcacaacaatggtatgattagactctgttcctgggagacatacaataccctcctttggtaggatctatgtggaatgtttagtcattagtgttattaagaaatcatagttatttaatttatgttttaagactttcacctttcattctctgaatgttagttagctcagggtgtgaaatggttcaacagaaatacttgagctgctgcagccagaaggatgtttatggtgttatgcaggaaatatcctgcagaattctgtgtggaattctgctcagaggggtttctctttagcataaactcaatttaaaaatactcttctgctcaaaagcattcttatgaaaccacctcaacacaaagcaaaactgtccaggcatagttgctgtatggagagatacagcatagaacccacgggcagcggggctgaagcagagaaaaactgcaggggaaagagaaacagatccaggaacggggagaggagagtgttgagcacaaattaactaccctggggaatgagtatcaggtgtttgacactttcacttttccaaataacctgaagacaaatggaacctccctgagttatgaaaaattgagactagaagtatcagagctgcagaattcatttggttcagattctgtatatataaaatctagacatagaacaagtctaagcaaaggcatattatctgcaatggttactatggattattgttcagagaagaaccattttggtatagagaaagctgaaagaacttacagaaaataggtcttgaaagatgaaaggcagagataatttcctgattcagaaactcagtatattaaattttctgtatgttatttatcatttatgatataaaattatgcttaatttatcatgtaaactgaaaataaaattctaagccccctgactgaattgaccttctcctggccaaaaggatcccagagtaaccttgaagactgaattctcagccatggtggatcagggagtcagacatacctccttataacccctccctcactaaccactatgaggctttcttccctaagggctaaacagaaatcagccctttcaaaagactcccccactgacatggaccaaccacctgacactttccctccattggtgcctcataagagaccacccactagggaatgattctagccattccactgagaatgtgcagtaaggatttttgtgtcctctgcttcaccttttaatgtcagagggccgaaaactctaccctcggatcatgctaatgtcgccattttttccacatggatcccacaaaggggcatgaagctcagttgaggatgtgcatgcttctcctctcataaatattcatgactcctcctataacttattgaacatatatatttggccaccgtgcttagcataaatttctgtttcctttttccctcccttgaagtgtctgtttctggcttctggctggaagttatgcttcccaacctgtcagaaggtcactctgcaggctgcagccctttataagaaataaagctctcctttccaaatttatgaacctcatcattcttcaggtgataatcatataaacgtctacttaagtttgctttcagtctgtcatgtgaattcagtcattctcactatattccttttgtggtatactggtctgggttaaagagaccctctagggattattatacagtttcgtcttgtttgagagctcagcagctgatgattatcacagatttgtatagagtggacactaccagatgtccagcacatctgtcacagcagatgtgacattgagccaagtctatttctgtctaggtgtatgatacttggtgctatactttggatatggtttgtcgccatcaaatctcatgttgaaatttgattcctaatgttggaggtggggcctaatgggaagtgtttgggtcatgggtggatccctcatgaatggtttttgcctcattctcactgtaacgagtgagtccttgctctgttagttctcatgagaactggttgaaaaaaaaaaaaaaagagcagcctggcacggtggctcacacctgtaatcccaggactttgggaggctgaggtgggtggatcacctgaggttgggagtttgagaccaggctaaccaacgtggagaaaccctgtctctactaaaaacacaaaattagctgggcatggtggtgcatgcctataatcccagctacttgggaggatgaggcaggagaatcgcttgaacctgggaagctgggagggagaggttgcggtgagccaagagcatgccattgcactctagcctgggcaacaagagcaaaactccatctcagaaaaaaagcctggcaccccaccctgtctcttgtttcctctctggccatgtggtctctaccccacacaggctgcccttgccttctgtcatgaggggaagtcacctgaggccctcaatagaagctgattctggtgccatgcttcttgtacagtctgaagaaccataagtcaagtaaacctctttttaaaaaaaaaaattacccagcctcagatattcttttatagcaatactaaatggactaagaaacatggtctatacagtcaattttgttcatttctttaatatttattgaatatagacaatgtgcaaggcactggttagagatgtggagactatgaagttggcaaatagagaataataatattgagaatcctgcaaagtaaccaaattgattttagaagctcctttatgaaatagactttaggctttagtcttcttggatctttacttggaaatttaggtattcctgattttaacagattcatttttttaagtcccagagtagaagaaaatggaggttgaacactgaaacattgactttgaaaactgaacatctctgtcaatcccacaatctgtgtgtttgtgtgtgtgtgtgtgtgtgtgtgtgtgtaagggtatgagctacaacacaatcttgaattgtcactaaaccatttttaaaataattggtcaaccacccatcacatcacttgtattcacaatcccataaagttatcagaccagagtgatttttctctaatctagatgtacattaaaatgtgcatctcatttaaagatagttttggtacatcaaagtgaatgttgataaacatgtaagacaatggaatataaagttcaatgcatgtcctgcattctctccatctaaccatttttgtggtgccaatgcctattttcaggtgtcaatgatgaagaactggaaaaagatatagttaaaacaaaaattgctaaagaaaaaaatgcatgcttttttggattcatttctactctttcatatcaatatgttttctaacatttcttaagtgctgagaaaattttcctttttgttatcctcaatagcaggtggcagctgaaattgttcaattatatgctttgttaaaaccttataaataatttaaatactattattacagtcagctaaagcctatgctcaaattatattttcttttgtttaaattcccaaatatatctcacctgctaccctacattcacccccagtaaagtcccaaagcccgtgggctaggtagggcattattgttttagaatgttaccaagttggcctagaagagtacttgatttgttgcgacaactgttgttgttctctaggtagagtgttgcgtaaaggaaacagtgatgtccaaaggggctggactggcagattggaagtagggagacccaaggtcagcattatgacatggaggatatgagtaaccaccataatgatttaagatatctgaacagggttgccagaaaaaatacatgccacacagttaaatttgaatttcagataactgatttcttaaagcataagcatacctcatacaatttgttttatatttactatactttaagttctgggatacacgtgcagaacttgcaggtttgttacataggtatacacgtgccttggtggtttgctgcacccatcaacctgtcatctacattgagtatttctcctatccctcccctaggcccccacccctcgataggccccagtgtgtgatattcccttccctgtgtccatgtgttctcattgtctatatttggggcccactgctagtaaacattattcattgtttatctgaaagtcaaatataactggacagtttgtatgtttagtttccaaatgtagcagccctatatatgaagaaagtcttctctgctaaaaaaattattttcctgcttcctgaaattcaattaattagcattttcagttcagttagcaagcgcttccttttaaaagacaagtatctctgggagtacatgagtcgtttatgcatcaatgagactacttacttctcaatgtaaaatgcatttctcactgtcaaagtgggttaatcaatcagagagagggcgtaagagttctttttttggttgactaggtaggggatggggctggctgggacctgttaatttcagtggaagaatacatatggatgaattacttttagtggggattttctgatggaatgaattatcaatgtgccaggaagagactatataaaaagatggaatgggggtagagagtgtaaggtggtactgacagaaaaaactcactcattctaggatttttcttgaacaattaaatactcatgagaggaaccagtgttgggttttatttttcaaacatggatgatggtaaatgttaaaaccagtggcaagcatattttcacatttctttcattattaaaagtattgatgtaagattatcctcaaatatatgagtagtgcatctttgcacattaaggactcctcctttattttatcacttcgctttaactccgtaggtcctatacaaaccaaagaaattatcttccttccttccttccttctttccttttttttttttttttttttttttttttgatatagggtattgccctgtcacacaggctggagtgcagtgatgagatcatggctcactgtagcctcaaacttctggccccgagtgatactcacacctcaggctcctgagtagctgggatgcataccagcatgcccagctgatttttaaactttcgtacaggcagtatctctctatgttgcccaggtggtcttgaactcctggcctcaagtgatcctcttgcctcagcctcccaaattgctgggatgacaggcatgagccattgtatccagcaagaaagagaaaagaatttaaacttctaaagatgaaactgctacacgtggacagccataacaacaaagagaagagtactcttaagcatttgtgaaagtcagaaacctataaacttttgggaaacaaaataagtatattttccctttaatcttacaagtgatgcaatacacttctagcaaaagtgaaagggcaaataggaattttgcaacattgagctctctttaagcagaagccaggccataggttcttcactagtcaccagggtctacagcctttattgtctttaccagtcactaggtatgagacattttctcataaaatgtaactactatacattcgccacaaactttaaacccccttttcacctcccatggtacccagaagagtgataggtacttaataggtcctcaaaaattttcagctaatgaataattgttaattaaaacttatactagaagcaaactcttaaaacatattctaagtactaaagtctaatattttatatctattggtttattcatattcttgtttgttaatcctaatcaaatagtgcaaagtttaaatttcattttcctaagatttgttttaaaataacacgatttacccaagtgatttcaaaccacaattacattctgtttaaattactaatattttattgcatcacaatctgcatgaaacagatgtcaggatataatgaactaacctgcattgtatttttatttttgtctcctgtggcataacgatttcataggaaagagaactacacagctgactgactgatggggaaagttacacaatggatagctttgcagcaacatactaatgcggtagggagatgctgcagagaggctagaaataaaatcatttctttccggagcagcactgcttgctgtcggctgagacaaaaaagagatttcctttttttcctttcttttttttgaaaactcacataacattaattctgttaagcactggatacacggaaaggtgtttaccttagaaaatcatttagcaatttttagaaactagacatatagcaattttaaatctttttaactatctaatgaccaaagcagagggtcctcacaagagggatttagatgctactgaattgaataaagaaaatatggatacatttattgtatgccttattcagtttgaggttcattttgagtttagaaatagggatataaaaacatcaggggttaaatagcatgggtaaaggacatgaaccaagctgcagagaagaggctgactgcctgctatatttgcaggcattactcagcacttttcttaaaccgatacatcttgctggctgcataagcaagacaagacccttttccctatggctcaggaaggcagagaagtcaacttcagccttgaaaaaggcaaatactttagtgcaataatgaaatcaactaaacgtcttgtgcttaatgtttctttccccacgccactagaattgtatgcataatcattctatgcaacatattgaagaaaccaaaatgtttgccacagtgtgctcagtaatttttttttgaatgaatgaataactgaattcatgatcaatgccttatcctaggtcacctgctcagtgcacgggctataggaagggcaaatgtcactgtccttcccacccatctcattctaacacaagtgttatcatcaaactaaggaaactaaaacatgtagccataaaacaactgtttagagcttcattcagataatatttttttctttaaaatccaagaatgtaataccaaattttaattaagcgaaggcgtctttgtggagaacttaaataatatggcatattgctttctgtttatctagtagagactacactttgaaaatatagaccattgcattcataaaaatcatgtggagatctttttgaaaacacatagtccaaggtcccacctcaagattttgtttcagagatctaaggtggacctagaatctgtgtttaaactgcttgtccaggtgatcaggatgtagcactcatagttaatgaatgggcaaattttgagaaacactgttttagagaatggtctaggaaaagcatccattacaaatataaaaaagcaagcttttggtacctaagggactgagtcgattcatgcaggtattggtttgttgattaaagatgcatccataattcaattaatttaaatgttagaacaggtcatatcttttgggtttatttttaattgtttcgtacagatgaggtctcgctatgttgcctaggctagtcttgaactcctggcctcaagtgatccttctgcctcagcatcgggagtcactgggattaaaggcatgagccaccatgctcaggtaggaaaaaatcatttcttacatggagatttattttctcaaccaggtaagttttgtgataagatcattaaacttagaataagaatagtcaggttcaaaatttggttgtagtccttaacaaaactgtgatattaaaatagtaccttggccttgcttagcttcaattctatcatttataaaatgggaataatttttataataacacatgataggtgccaactcagccctcactccttttttgaaattgtcctccatgtaacccatactgaaagtataaactatgtttataccatgtgactctttcacccctttcccatggccacagcttggtaggttttatgaggacgctgatcacggggcactcatctataggcttaactgaaacaatagaatttgctttctgggtgatgtttaaatgaagtaagagtgagtgagtcagaatgttatgagaagatgcactgcatgacctagagttgaggatgaggaagctatgtctggccatgaccaagcagaggatatcggccaaagcagaaaaaaaaaacagaaataacagtagccatgcaagcattcagaaagaatgtaggctgtgttgatatgtttctggacttctcattccagtttaatctctttatggcttacttgggttttggcctatgggattttcagttgaattcttctttttttttttcctttgagatggagtctcactctgtcgcccaggctggagtgcagtggcgtgatctgggctcactgcaagctccacctcccaggttcacgccattctcctgcctcaacctcctgagtagctgggactacagttgcctgccaccacgcccagctaatttttttatttttatttttagcagagatggggtttcaccgtgttagctaggatggtctcaacctcctgacctcacgatccacccgcctcggcctcccaaagtgctgggattacaggcgtgagccaccatgcatggcctgaattcttataataaataaaccattttacttatacccgcttaaatgtgcctttatgttttgaatacaagtgttctgacaaaagcacaatgtaaaaacactgaacataacatgttcttaacttttgttttaaaacaaaagaaaaaaatggaggttcagcaaagttaaatagcacaagttaataaagtgatgaccattgtcagacagtttggaggaagtttgagatttaaatccgggtctaatctttcacagttcaatgctcttgttttaaaaccagaaattcaggcagcaagactgatatttcattagaaacacttatgaccccaatatgttttcacattgagaaactgagtcattccactttttcatgaaaatagctaaaagaatccttatcggtcaaatctttcacacacacacacacacaaaaatgatctttaacattatttcaagtacttggacaaataccaagttgggataccagagatctatgttatgaaggatggataaaacatctgataagaaaaaaagaaagccattattattacaccttaaatattaaatgagaaaacaaggaatgacccttggagaacgactaattttgagaattgtatactgatagacgtgttggaatggactacttgcaaacagaatcactgagccacttaatgagttgagtggttgaaagtgtccttttaaatgatcaatttagaccccagagaatatctgccagacagaacaagttttagtgtagttgatagtaagttgtgcccagaatattaaattgagtcaaatttattttccacataaagtcacagttttatatgtcattatataatctcttggcagaaataaggaataacattctgaatgttgcactccaaaattcaaagaatcttagtataaaaatatctagcattttagatgtttcaaagtagggccaaatgcagaaaataagttggatatgataaaaataccagaaagttctattcagttggcatcttactagcagtttcatcttctaataatttagttgctacgcatggagtagaatagaatttaacaacaacaaaagatcattaaataccaatcaaccaaacaaccaaacaccaaaggacctattaaacttcaacgatgctcagttatactcttgagggtacagggctatcagagatgggcagtgtgctcctttcctgtgtagtctatgggatctatctatgtaaccctccatgtgctcctacccttccccttcagctgttaaaaacacaatgccaaaatcaggatcaaacaaaaattgcagttacacttctgaatttggcaacatctatttcaccactccttttagatcatttggtctttattattctgctttatattgtatttgattttgtaagtcagatcaaataatttttggaaatagaaaacaaacaaataagctccccattgctacagtttatacccattttaaatgatttatctttccatagggataaaaattcaattacgtaccctccttgtgacaaacctccatacaattgaaggcagttattatgtctctctttagttttctcttttccaagctgaaaaattttcaatattttaacccataggtatgatataattatttgtattcctcttttgctcccttctaatttctgcccaacttcactaatctccttagggtagaaactgtaatagaataatggtgataagaacagtaaaaagatgatgtctgatttttgtatacatttcccttagtacgaattactgtgtcaagttttttagtaatataatacctttatttagcctttgtcattgtacaagccagtttgacattttaacaaagggggattgaaacaataaaactgatctttaaatataaaaatatcccatgatcccatgattctcctgttcttcctgctatcaatcagaaacaacgatgcctgttaaataaaagagccttattggttctaccaaatttgtgactaattagcttctctgccatcctgttatttgtatagtttgttcttggttcaaaatatactacacgctaaccaaacttgacactagagtctcacttgccttgatgggccaattcctaaaggtttcaaggttattctgtttcctatttatacattcctcagagctattaatatcagtttcacttaaaatttatatttaatgtcaatacccagcatgaaaaactattaaatggtaatagtctttagattaatttagataaatggtaattaatatatttttccaggatgtcataaaatcatcattacttaccttgaaccacttgaaccctcccctaaaagcaatatgatacagatgaataattgcagaaaattaggcccagatttattctaaagttttcaagaattcataatgtcccactccagttttggattcatgttaaatacatgtcttacaaacattcacactatattctttttaaattatacaaatgtaagtatttaataaaatgcaaattctctcaaagagttattgactccacagaagacttttgagagtcaatgtctattgttactatcaactgacactgaaagttcaatttctttcattcatatggtagtccataattctgatatgaaagttggaaatcagggatgaaaaatcacttttttttttggttgttgttacagagtctcgctctgtcgcccaggctggagtgcagtggtgtgaattcggctcactgcaagctccgcctccctggttcaaacaattctctgcttcagcttcccgagtagctgggattacaggcacccaccaccacacccagctaatttttgtatttttagtagagacagggtttcaccatgttggccaggctggtcttgaactcctgacctcgtgatccacccacctcggcctcccaaagtgctgggattacaggcgtgagccactgcgcccagcctgagagatcatgttttttataagaacatatacatgtatagatatgcaaataccttcttaaagcacagataagtggtatccattatttttttcttgatcaacatgacattttgcttcaactcaaaagaaaattacattgatctgacaatttcttttcacaaggtcatagtaattttattctatgctattctaggtgactattaattttaatatatgtgtgactttttgttgtttttgttttgtttttattgaaatttgaagatactgagttaagatgaaagtcctaaagttcttcaatcacttttctgaaatctagacctccaaatttgccctttcataaagtttaccactagacttaacaaaacactctaagtgttcaccattagtgatgtaaatctaaaatactatatacttctttcttctttgtgtgtgttttttttgtttttgtttttgtgtttttggagacggggtcaggctctgttgcccgggctgtagtgcagtggcatgatcgcggctcactgcaacctaactctcccaggttcaagcaattctcctggcttagcctcccaagtagctgggactacaggtgcatgccaccacacctggctaattttttgtattttagtagacacagggttccaccatgtcacccaggctggtcttgaactcgtgagctcaagcaatctgcccgccttggccttccaatgttttcttttttaacaatttacaaatgtacagtgattacacttcgtttctatttttgaaacttttttcaccttccttcctagaaggggaaacctattaatagttctagaaatctcaatgcctacctcatcctttagtctttattaatttgttttttctaaatgccagggtttgaaaatcagataaacaccatctctagagatctgctatatgtttaaaaaaatgcttatacgtgagattatctagacttcactttgaaataagagatataaaattatatttggtatgttcaaaggtacttgtattcaattaaaaaaaaatagggtcttgccctgtcacccaggctggcgtgcagtggcatgatcatagctcactgcagccttgaactactgggctcaagtgatcccttcctcagcctcctcagtagcttggagtacagatgtgtatcacctgaccagctaatttttaaaaatattttgtagggacagggtctcactttgctgcctaggtggatcttgaactactagcttcaagcaatccttccaccttggtctcccaaatttctgggattacaggcatgagctatcacacctagcctctatttgaagttgtattctagagtcttgtagaattagaaaacttttatctagataaatagaggtcattgtagaaatatttgtatgcaatctgccttgtttggatgaagttttcttctcttgcatttgtaacaattcacaagaaatatctatctgtctatcaaaatctggcagagacacaatgaaaaaagaaaactttaagctaacatccctgatgaatatagacacaaaaatcctcaacaaaatactagcaaattgaacccagcagcacatccaaaaagctaatccaccatgatcaagtaggctttattcctaggatgcaaggttggttcaacatatacatatcaatagatgtgattcatcacataaacagaactaaaaacaaaaaaccacatgatcatcttaattaagatgcggaaaaggctttcaataaaattcaacatctcttcatgttaaaaaccctcaacaaattaggccaaagcataagagccatctataaccaactcacagccaacatcatactgaggaggcaaaagatgaaagcattctccctaagaactgaaacgaaacaagggtgctcactcttaccactcctactcaacataatgctggaagtcctagccagagcaaccaggcaggagaaagaaataaaaggcatccaaatacgaagagaggaagtcaaactatctctctttgaaaatgatatgattttatacctagaaaacaaaaccccacagtctcttcccaaaggctcctagatcaaataaacaacttcaggaaagtttcaggatgaaaaattaatgtacaaaaatcagtagcatttccatacaccaataacatccaagctgagagccaagtcaataatgcaatctcattcacgatagccacgaaaagtataaaatacctagtaacacagctaaccagggagatgaaagatctctacaacaagaattatgaaacactgatgaaagaaatcagagatggcacacacaaatagaaaaacattccatgctcatgggtaggaagaattaatattgttaaaatgactatgccacccaaagcaatttacagattcaatgctatttctatcaaactaccaatgtcatttttcacagaattagaaaaactatttgaaaattcatataaaacccaaaaagatcctgactagccaaagcaatcctaaacaaaaagaacaatgtctgaggcatcacaccacccaactataatacaagtctacagtaaccaaaacagcatagtactggcacaaaaacagcttatccaccacaatcaagtgggcttcatccctgggatgcaaggctggttcaatatacgcaaatcaataaatgtaatccagcatataaacagagccaaagacaaaaaccacatgattatctcaatagatgcagaaaaagcctttgacaaaattcaacaacccttcatgctaaaaactctcaataaattaggtattgatgggacgtatctcaaaataataagagctatctatgacaaacccacagccaatatcatactgaatgggcaaaaactggaagcattccctttgaaaacgggcacaaggcagggatgccctctctcaccactcctattcaacatagtgttggaagttctggccagggcaattaggcaggagaaggaaataaagggtattcaattaggaaaagaggaagtcaaattgtccctgtttgcagacgacatgattgtatatctagaaaaccccattgtctcagcccaaaatctccttaagctgataagcaacttcagcaaagtctcaggatacaaaatcaatgtacaaaaatcacaagcattcttatacaccaacaacagacaaacagagagccaaatcatgagtgaactcccattcacaattgcttcaaagagaataaaatacctaggaatccaacttacaagggatgtgaaggacctcttcaaggagaactacaaaccactgctcaaggaaataaaagaggatacaaacaaatggaagaacattccatgctcatgggtgggaagaatcaatatcgtgaaaatggccatactgcccaaggtaatttacagattcaatgccatccccatcaagctaccaatgcctttcttcacagaattggaaaaaactactttaaagttcatatggaaccaaaaaagagcccgcatcgccaaggcaatcctaagccaaaagaacaaagctggaggcatcacactacctgacttcaaactatactacaaggctacagtaacccaaacagcatggtactggtaccaaaacagagatatagatcaatggaacagaacagagccctcagaaataacgccacatatctacaaccatctgatctttgacaaacctgagaaaaacaagcaatggggaaaggattccctatttaataaatggtgctgggaaaactggctagccatatgtagaaagctgaaactggatcccttccttacaccttatacaaaaatcaattcaagatggattaaagatttaaacgttagacctaaaaccataaaaaccctagaagaaaacctaggcattaccattcaggacataggcatgggcaaggacctcatgtccaaaacaccaaaagcaatggcaacaaaagacaaaattgacaaatgggatctaattaaactaaagagcttctgcacagcaaaagaactaccatcagagtgaacaggcaacctacaaaatgggagaaaattttcacaacctactcatctgacaaagggctaatatccagaatctacaatgaactcaaacaaatttacaagaaaaaaacaaccccatcaaaaagtgggcaaaggacatgaacagacacttctcaaaagaagacatttatgcagccaaaaaacacatgaaaaaatgctcatcatcactggccatcagagaaatgcaaatcaaaaccacaatgagataccatctcacaccagttagaatggcaatcattaaaaagtcaggaaacaacaggtgctggagaggatgtggagaaataggaacacttttacactgttggtgggactgtaaactagttcaaccattgtggaagtcagtgtggcgattcctcagggatctagaactagaaataccatttgacccagccatcccattactgggtatatacccaaaggactataaatcatgctgctataaagacacatgcacacgtatgtttattgcggcattattcacaatagcaaagacttggaaccaacccaaatgtccaacaatgatagactggattaagaaaatgtggcacatatacactatggaatactatgcagccataaaaaatgatgagttcatgtcctttgtagggacatggatgcaattggaaatcatcattctctgtaaactatcgcaagaacaaaaaaccaaacaccgcatattctcactcataggtgggaattgaacaatgagatcacatggacacaggaaggggaatatcacactctggggactgtggtggggtggggggaggggggagggatagcattgggagatatacctaatgctggatgacgagttagtgggtgcagcgcaccagcatggcacatgtatacatatgtaactaacctgcacaatgtgcacatgtaccctaaaacttaaagtataattaaaaaaaaaaaaaaacagacacatagaccaatgaaacagaagagagaacccagaaataaagtcacacacatacgacgttctgatcttgaacacaatcgataatagcaagcaaggcagaaaagactccctgttaaataaactgtgctgggataactggctaaccatacgcagaagattgaaactggaccccttcctttcaccatatacaaaaatcagttcaagatggattaaagacttaaatgtaagacctaaaactctaaaccctagaagaaaactaagaaatacctcgattaaggccttggcaaagatttcatgacaaagtctccaaaagcaattgcaacaaaaccaaaaatagacaagtgggacctaattaaaataaagagcatctgcacaacaaaaacaaaactatcaatagagtaaacagacaaccagcagaatgggagaaaatatttgcaaaccatgcatatgatgaaggtctaatatccagtatctataaggaacttacataaatcaacaagtgaaaaacaaccccatttaaaaatgggcaaagaattaaaaagacagttctcaaaagaatacatacacgtgaccaacaagcatatgaaaaaatgctcaacatcatgaatcattagagaaatgaaaatcaaaaccacaatgagataccatctcacaccagtcagaatgacaatttttaaaaagtcatgggcggggcgcggtgactcgcgcctgcaatcccagcactttgggaggttgaggcgggcggatcacgaggtcaggatatcgagaccatcctgactaacacggtgaaaccccatttctactaaaaatacaaaaaattagccgggtgtggtggtgggcgcctgtagtcccagctactcaggaggctgaggcaggagaatggcgtgaacccaggaggcggagcttggagtgagccgagatcgctccacagcactccattccagcctgggcgacagagtaagattacatctcaaaaaaaaaaaaaagaaaaaaaagaaaaaaaaaaagtcagaaaataacagatgttggcaaggttgtggggaaaagggaacacttatacactggtggtgagaatggatattagttcagccactgtggaaggcagtttgaagatttctcagaataaatgaaaacagaactaccatttgacccagcaatcccaatactgggtatatatccaaaggactataaatcattctaccaaaaagacacatgcacgcatatgttcattgcagcactattcacaatagcaatggcatgcaatcaacctagatgtccattaatggctgactggataaagaaaatgtggtacatatatgctagggaacattacacagccataaataagaacaaaagcatgtcctttgaagcaacatgggtgcttcagagaaaataccattcaacaaagtttcagtaatattcgagctattttgtggataatgcacaacttttgtaccttaaggcattgttcaattctgtttaagaataaattgtttttgagctgcctattagatttcaagcctgactttagatttgggagatatatatatatatatatgacggtttctgttctagaggagcagacagtctgttaggccagacacagttgaatagcaatatattataatattgaggaagtaggctgggcgcggtggctcacgcctgtaatcccagcactttgggaagccaaggagggcggatcacctgaggccaggagctcaagaccagtctggccaacatggcaaaacctggtctttactgaaaacacaaaatttagccgggcatggtggcaggcacctgtggtcccagctactcgggagactgaggcaggagaatcacttgaacccgggaggtggaggttgcagtgagccgagttcgcaccgctgcactccagcctgggtgacaaagcaagactctgtcttaaataaataaataaataaataaataaataaataaataaataaatactgaggaagtataacaataagttatctttgagacacggaggaagcacagaagaggatataatcacttcttttgggatatgaggagggggaaaaatgttaagagaagcttcctaagtaggtgagagctgaaatgggttttgtaaaataaaaggaaattcaccaggaagataaaggtaaaggactgaggacatgtgaggcatgtaaaattaatatgatcttttagtcacttagaaaaaataccataaagaacactaatagtgtttaaaagcatctacccagtgccaagaactgcattatgtattggtgaacataactttagactttaccatacaacgtgaaaatatatattattatcactattttacagatgaagcaataaaagtcagaaaaaatgtagctaattaaagtgatactgtgtatagctagagcagtgtatagctagagctgatttgtctgactctagccctagtttctttccattatatcaatttcctggaaatgtatctctgttcatggcatagtgcctgacactatgcttattaatatcttttgaataaaagaaccactgagtgatttgaaataaaactaaatttagttagttaattttattggtggtatatagagatagtaggaaaaataattgaaaagagacataaacagatttgccaatactttctaagaaaaattatggaactagagtttagtcaaaatgaatgctttcattgttagaattcaactttaatctttgcagaatacaaacaaagacccattttctagaagaagtaacagggaagagagagtaagaaagagataatgatgaacattgtctaatgttacagcataatctagtaaggtaagaacagaagagagttcattgacttaccaacatagttgtccctaatcacctctgtgaacctagagtgctacgatataataatgattgtggtggtttaaaaagtaaatggggctgggcatggtggctcacatctgtaatcccatcactttggaaggctgaggcaggtgtattgcttgagctcacaagctcgacaccagcctgggcaacatggcaaaaccccgtctctacaaaaaatacaaaaattaaccaggcatggtggtgcgtttgtgtagttccagctacttggaaggctgaggtggggggattgcttgagcctgggaagtggaggctgcatgagccaaggtggcaccactgcactccaacctgcgtgacagagccagatcttgtctcaaaaaaataaaaaaattaaggtacattttatatatgagactatgagaccgccaaatgatatttctcagccaacagccttcacagacatttgtcttagagccgatttggctactttgtgttgccagtatgctgttgtaagaaagcacaggaatgcttgtaaagaagaaaagaattggtatcatggtcctgaaaaaagttatttcctcaaggaataaaaatagcaaaagaaatgacgtaatttctcagcttctgatatgtttcaaataacctcagtgaagtcctaggggaaatagcttatatcatatgtcttactccttaggatttttgctatagaggaaaaagtgtgaagttttcttaatttaatgttttatacatatttgcttgctgtacctggaccttacaaagtggatactctttagaaagtgatgaatattttcacttttaaaaggtttcagagtttaaaaaggttaaaaagaatcattcataaaagtttaaaaacaacttcatcaagggtttcccttttgccaagttataagtttaaaatgagagaatgaatttggttattaacagggttaccaccaggcctgaatgtaaattaaacctttgccaatagaagtgaaacagaaagaatcaaccaacaattttatgaattacagacctcatacacattaaaacttctacatatgtagttatgcttcagtgaaaccctttacattgtagttatgcttcagtgaaaccctttatattaaaataatcatcacgtatttgaccatatgaaaatagtttacatctaccacatttggtttatcttggccaaaaacaattaatccttagaaaatctactatatgaataactcaataataatcaaagcatttgaattagaaataggatcaaacacacttttttgaatgaatgcctaatttttatttctcagtggaaatgctagagcatatccaatattcactagtgaaaaaggctattttccatgaagcccatgagaagatgacataagttaaacttgtccaattccttttcagggatagcatcaagaaattgtctttacccctataaactgaagcatttgaaaatcagtaatattaactgagcaaaataacttgtggcaacaggtatcagtctgggacacaatcaagatacagaaaccgggccgggcgcggtggctcacgcctgtaatcccagcactttgggaggccgaggcgggtggatcacgaggtcaggagatcgagaccatcctggctaacacggtgaaaacccgtctctactaaaaatacaaaaaatgagccgggctgggtggcaagtgcctgtagtcccagctactcaggaggctaaggcaggagaatggcgtgaacctggaaagcggagcttgcagtgagcccagattgcgccactgtgctccagcctgggcgatagagcgagactccgtctcaaaacaaaaacaaaaacaaacaaaaaaagatacagaaaccacatgctaatttaaacagagaaagtttaatatatgaagaattattaagtactgataggagagtaaccataaagatgtaagagaatctaaagggtatcctggagctaaggtagaggactcaaagaagagtgaactggaaggatttcccatcccaaggttggggtccaaacttcattgggaaaagtgtggtggaagccctctttctctacagcagaatagtttgctggggtgtcctggccggagctctggtccacagttgggctactgttgggcaagcagaaacaattctttagggcacaggtgagctaaggttggtgggtgggccttcagaaggagtgcggcactgaagtgaggatgtgtctgtgttggcagtgtgcggtgtcagtgctgggagaactgtggcaaagtggtcactaggcccttatatagaggctgtgaagtcaccaacagactgccccatctgggcatgtggctggggaaaaacaccaccagatgtcattacacaagcacgttgccaatggtccattgctaatggtccacattgctaatgatcgaagtaaaatcaaaatgtagcattagaaccaggaagagaagccccttcctcctgcagtgacccttcactgccctctactgacaaagagtaacgttatgctcacggtctaagaaaaatgctttaagtgcccaatacactatttctggttagctaccaaagagagctaagaggcaatacactggtaactgtcatgtcttgtacatgaatatcattattcatgtttttttaaaatcacagactatacttcttaacagctacatacattttatttatattcatcagaaacttactgcttattctttgcccttaactacttgtatagaccaacatggaaccaaatttgctgtcatataggctgttgatctcttcatccactagcacttttctgaaacaaaaagcaagtaatcttcgaattcacataagcatttatctgcaactctggtgttacttgacgactgacttctacctcccagtatatttgcttgtgaatatgtcttgttttttgctttagtccataagcaccttgagagcagcatttacctttgcattcttcactgtatcgtgcaaagtactttacccataacagtcacacaatagttgctgaattaattaataaaatatttggaataacaacacctaagagtgagaggttacaaaacacgatagttcaaaattcaacagttataaaaaaaaatcaaaagttaaaatacagaatatgttacagtattgaacattgtatggtaaatgtaatttactggaaagtatgaattttatagtgatcacatacttttcttaatatttagatatctgacacatgtaaagtagcaatagttcttattctgaaccattcttgaataaataagaagagaacacaacttggctaacaatttttatcaattcagctttgggtgctaacataatttaattgggaaagaataatcatttcagcaactagtactagaaaaaccagatatccacatgcaaaaggaaggatttgaaactgtggataacaatgtacaaagattaattcaaaattaatcataaatttaaacgtaagaactaaaactataattctttaaaaatatgagtaaatatggtgcacatacataaggtaataatttcttggctgcaacaccaaatgcataagtggtcaaaagagaacattgataaattgtacttcataaaaaatcatttgcccttcaaaagacaacatcaaaaaatgaagacaacccacagattgaaagaacgtatttgcaaatcatatatctgataagcgattgtatctggcatatatatatatattttaaaactcttacaagtcaataataaaaaaccccaaagaacctaactataaaaataggcagaagatttgggtagatacttgtccaaagaagataaatgactaatcaacgagcacatcagatgctcaacatcattaatcatgaaggaaatgcaaataaaaaacccaatgagacatcacgtcacacacactggaatgactataataataataaaaaaaacagataatcacaagtgttgggaaggatatagagaaactggaaccctcatatattgttagtaggaatgtaaaatggtacagccatttggaaatacactggcagtgtcttacaatgttaaacatagattcattatatgacccagtaatttcattcctaggtatctaatcaaggtaaatgaaaacatgtatccatatgaagacttatatggacatgttcatagcagccttattaacaatagcccaaaagtggaaagcacccaaatgtccattagctggtaaatggataaacaaaatgtggtatatccatataagggagtatgattggtcaattaaaatgaatgaatactgaaacatgctgttaggtgagtgaatctcaaagatattatgttaagtgaaagaagaaagtcacaaaagatgacacattgcatgattctattcatataaaatgtctagaataagcaaatgtacagagacagcaaatagtgattgcctaggactgggagtgggaatagagagtgactacaagtgggcatcaagtttctttttagctcaatggaaatgttctaaaatgagattgtaatgattgctgcacaactctataaatatacaaaaaagcactgaactaacaaggagctaaaactacaatgataatcatgtaagcagtgataattatttgattcccttctttttctgtttgaatcagaatgccttgacaattttttattcttttctcttctataggatttcaaggagtttagaactttacagaaataataacaaaaattacagcatttgattaataaatacatcttttagtaattttctttttgcctaaagtcaagaataattgttcatcttagtatgtttattaactactcttggtgttatgttgggcgttataataaagaaaaatctttgtttcaaaatttaggttggaattttggatcctactctgactaactaggtacactactgaatttacatcaagataacagtacagatagataagaacattgatttccttaagatcagtaatttgaagcttaaacatagtatgcaacacattgagagtctcaaagaagtaacaagtgccatctttagaaaatattttatatacttggtgtggtcttatcataagaagtatatacatacataccttgacatattgtactttgctttattgtgcttcacagatacagtttttcacaaattgaaagtttgtggcaaccctacatccagcaagtcaattttggtgccatttttccaacagcatgtgctcacttcgtgtatctgtgtcacattttggtaattcttgcaatatttcaaactttttcactattattatatctgttatggtgacctgtgatcagtaatatttaatgtcactttagtaattgcttggggatggcaagaactgcacccaaataagagtgaacttaattggtgttacgtctgctctgactgctccaccaacatgctgttcccgtctctcttcctctccttgggcttcccagttccttgagacacaagaatattgaaattattccaatcaataaccctactatgtgggtggtggggaggtgggaatgattaatgggtataaaaatgtagttagatagaataagatccagaaatgtagttaaatagaataagatctagtaacacaacagttatcacagtcaacaataatttattctatattgaaaaatagctaaaagagtataattggaatgtttgtaacacaaagtaatgataaatgcttgaggggacacataccccatttactctcatgtgattattgcatatgatacgcctgtatcaaaacatctcatgtaacccataaaggtatacacctactatgtagccatacaaataaaaaaaatttttttttaatccctacaatggcctttaagtgttcaagtcaaaggaagaattgaatgtttctcactttaaattaaaagctagaaataattaagctttgtgaggaagacatgttgaaacctagataggccaaatgctaggcctcatgaaccaaacagttagccgagttgtgaatgaaaaagaaatattcttaaatattcttgaaggaaattaaaagtgctactccagtgaacacaaaaatgataagaaagtaaaatggctttattgctgatatgaagaaagtctgaacaaaagattgaaccagccataacattcccttgagccaaagcctaattcagagcaaggctctaactctcttgaactctgtgaaggctgagagaggtaagaaagctacagaagaaaagtttgaagttagcagagtttggtttatgaggtttaaggaaagaagctgcctccataaaattaaagtgcaaggttaagcagtaggtactggtgtagaagctgcagcaagttatccagaagatctagctaagatcattgatatggtttggctatgtccccacccaaatctcatcttgaattgtagctcccataattcccacatgtcatgggaggaacccagtgggaggtaattgaatcatgggggcaggtccttctcatgctgatcttgtggtagtgaataagtctcaggagatctgatggttttataaaggggagttgctctacacaaactttctttgcctgccaccatgtaaaacatccctttgctcctccttcatcttccaccatgattgtttgaggcctccctagccatgtggaactgtgagtccgttaaactgctttcctttataaattagccagtctcgggtatgtctttattagtagggtgagaacagactaatacaatcattgatgaaggtgactacactaaacaacagattttcaatatagatgaaacagccttatattaaaagaagatgccatctaggactttcatagctagagaggagaagtcaatgcttggctttaaagcttcacagaataggttcagtctcttgttaggagctaatgtcaccagtgactttaagttgaagccaattttcatttactagtcaaaaaaatcctagggcccttaagaagtatgctaaatatactctgcctgtgctctataagtagaacagcaaagcctgaatggcagcacatctgtttacagcatgctttattgaatgttttaagcctgctattgagacctactgctcagaaaaaaaaaaaagattccattcaaaatattaccgctgactgacaatgttgcaaagagctctgatggagatgtacaaggagattaatgttattttcatgcctgatagcacaacacgcactctgcagctcatggattgaggaataatttttattttcaagtcttattatttaagacatacattttataagactatagctgctatagagagtgattcctctgatggatctgagcaaagtaaattgaaaatcatctggataaaattcaccatcctagatcccattaagaacatttgtaattcatgggaggaggtaaaaatatccatatgaacaggagtttggaagaaatcgattccaactttcatggatgactttgaggggtacaagattcagtggaagaagtaactgtaaatgtggcagaaatagcaagagaactagaattagaatgcagcctgaagatgtgactgaattgctgcaatgtcatgataaaaccttaagagaggaggagttgcttcttatagacgagcaaagaaagtgatttcttgaaatagaacctactcctggtgaagatgctgaggacattgttgaaatgacaaaaaaggatttagatattacataaatttatttgataaagcagtggcagggcttgaaagcattgactccaattttgaaacaagttatactgtgggtaaaatgctatcaaacagcatcacatgctacagaggaatcttttgtgaaaggaagatcaatcaacgtggcaaacttcattgttgttttattgtaagaaattgtcacagtcatctcaaccttcagcaactaccaccctgatcagtcagcatccatcaacatcaaagcgagactctccaccagcaaaaagattatatgactcactgaaggctcagatgactgttagcattttttagcaataaagcatttttaaattaaggtatgcactttttttcaacataatactatcacatacctaatagactatagtatggtgtaaacataacttttatatgcactgggaaatcaaaacacttgtgtgactcactttattgcaatattggcttttttgtggtgggctggaaccaaatgtgtaatatctctgaggtgtgcctgtatttggtcttagttcttgctgcctggcacagagctcctataacccttgttatttcctgattaatattggtgatagcagcatctttcttatatttggccttagttccattttctgacataagagcttctataatctttagaatctctggagtgcctttttgtatgctaatgagatgacaagtggctgagggcccctacatagcttcaggattgaggctagtcactagaaagacctgcatctgcaagggatgggctaggggttgaagattaagctaatcaccaatggtcaatgatttaatcaattatgcctacataatgagacctccataaaaactctaaattatggagtttggatagcttctcctaccctatactttctgctatatgtctcttccaggctgttcctttacaataaactggaaatagtaagctcttaaattctgtgagctgttgtagcacattattgaactggaggatttatagctggtcagtcagaagttccagaggcctgggtcttgcaactgatgtttgaagtggggcagttttgtgagactgagccattgacttgtggtatctgaggataatgccaagttattattgaattgaattgtgggacactcaactggctgtcagacaattgagtggtgagggaaaaacagaaacaaaaacaaaaacaaaacgacccacatatttgatgtcagaagtggtgtggttaaaacagtagtacttggcttttttttaaatttagaatctaagtacttaagagtagatatcttggcacctagtattaaatatactaggttctcaatacatattgttaaatgaatgactagtaaatgaaaaaagaatgagaaaattatttcttgctctgaccaacttcctgactgttttactctaagtcccaataaatatgaatattaccataatagctaaaagaatgctattgattaaaatgtttcctgtcatttgtcttttagcttgaacaaccgatatatatactaatcataaatataaaataacaggtgtgctataattttaaacagctacttttaaagttttgaaattgtagattaccctctgagaattagatgcatacaccaaggttattgctagagggcaagaattactacactttaagataaaacacaatggagacttggaagggtagtaggtgcaaggtgggtggatgataggaggttgcttggtggatacaatgcacattgctccagtgatggatgcactgaaggccgtaacttcaccaaaatgcaatatatcaatgtagcaaaattgcacttgtaccccacaaatatacaaaaatttttaaaattgataaaataataattaaaattgtttttcacactctaatgttaccttggtttgagatataatgtgatccttggatctcatggagaatattaataattctctttcttagataataacaaacctgtaactattcatatttgaaaaataaataagaactttaaaactgttaccacttccttacctcccttccagctatcatattatttagtatgctcatcaaagacagattttaatgtatattttaaatttcttaaaaagtttgtatcaagaactctaagaagaaagttgttttctgctgtaaagtggtagaaaaatcagaaattagttaaacaatgcaatgattttcagagagttgttcaatgttaatatataaattattttgtgcctgtttctgaaagcaggaaaacatctgagagtattaaagaactagcccaaatgggttcattttgaacaaatgatgagagaaggagagagtgaatgaaagtagtgagccaagctctttgtgtgattcctactcccagtgaggaccagaagggagaatcaaaaagaaagagaacaagcccagtgcaagaaaccatgcactggaattgtttccttcagatttaagtgttaattgactatatcttgtgtgtactgcatggactttgttggccttctgttttccttaatcaagaaaaccctaagttttgggatctgtttatacaacagatgatcttttggctattaataaaaatgtaaaattcttggtatttttaatgtgttatttaaatttacttcaaaagtaatgatgcaactaaaatgaaataaaatttccatgattatcagaataattaaataaatgtaaaactacaaggaaatattatgaagccattaatattatacttttgaactattctgatggcattaaaaaatgtttaagatgtaatatgtgctacaaaattgaaaacaccataggaatcccattattcaaacaggaagagaaatggtttagagcaaaatattaacatgttaaaagcaatattttattattgtggggaaaatcacatagattatgagatcacaaatattattttcttctttatgcttttctaaatattctgttttctataatatcaatgcattccataactataaaatatagtacttgaataatttgctaataattagactcaagcaaagaccaaagaatgcctcaaaatgagctaggcacggtagctcacgcctgtaactttggaaggtcgaaacaggtggatcacctgaggtcaggagttcaagaccagcctggtcaacatgatgaaaccccatctctactaaaaatacaaaaaattagctgggcatggtggcgcatgcttgtagtccccgccacttggggggctgagacaggagaattgcttgaacccaggaagtggaggttgcagtgagccgagattgcttcattgcactccagcagcctgggaaacaagagcgaaactccgtctaaaacaaacaaacaaaaaagaatacctcaaaatgataaaaggagaagtaatcaaatttctcagacactgaataagtaaaaacagctaacagtaataatttgaagaaaaaatgcattcagaattactttgaaaagcagtgcttaatcatagtatatataagtagttcaatactcatagtatatatgagtttagaataggagtttgggacttgcataagaaataaaagaattatttaaattattatatgcttcaagcatatttctacaaaaacagtatttgcgaaagcatcctataaaatgtaaaactgtcaggtattaatattaaaggtaaccctaaaaatgtttttgttttgtttcattttcatttaacaatttctattgagaacctagacaccgaaaacggaagtaggcagtggcaatgagacttagtcacatcagacaatatgctgcaccatattgcaaagaaggtacagtatagcagaggaagacaggggaataagcacaataaagtgcagtgggagagatgatagaaatgtatacaggacctaggcacaacacaaaaggaaattaatcatacttggggaagaagaggtcgtggctattcaccaaataaagaagcagtagcaaagacctagagatagaaacagctttaggtcttcacagaaatgcaattagttctttctgaaggactaatggtaaggtagatcgaccatggggtaagaaataaacctggacagctcatgaaagccagccatgctgaataactgaatagcttttactccaggatataacttacagtcttaaaaagtagagatgtggcccacatgtttgaaaggtcactggtggtagtatggagatcaggttctaattgagggaagggagtgggtgaacatttagaaaaagaccaatagaaacttcttacattggtttaggtgaggaaagatgaaagtcctaacaagagtattagaacatttatattttataatcctctgatttgctttgcaacaatttttactcactttatacagaacttactgaactaaactgatatgtgcagctcatattacagtaatgaaaaatgtactaacttgtgtaatgtgacaaatatcttctctatcctgcataattctgggggactcaattatctgcattataataatctcaactaatacagtgcaacaaacttaatctgaataatttatcagataatctgataattcatcagattcagtgtcccagaatctgatgaattatcaaattcatcagattcagtgtcccagaatctgatgaattatcaaattcatccttgtcataatttttttgtctcaagactccttttgattgttaatattattgaggaaacaaaaaattcttctttataatgagttcaatgtattgccatttaccatgttagaaagcagaaaaatcacaagcacatcaattaataaatttataaattataatcataaatcacatgtcaacaaaataaatttcaagtgaaaataaccatatttctaaaagaaaaagatctaatgggatgagtgcttggctaagttatgcaggtcttcaaaatattggaagatttcattattcatctgttaatattaccactaatcacatcagaaaccctgtaagttttgagaagctgttgagctcatggtggcagatgcatctttttcaaaataataattttctcttgaaaggccaaattttgtcactgacaacaaatattgtcaaatgtatttttaaaatgacagtctccatttattttcaaaaatttgtcttttcaatatctgtttgaataatcacaatttgtctctcagtcattttttcaaataaaaatagtattctatggaagtacagctagtttagcttgcaactcaaacaactacacaagtgctttaccttaagacaaccagcattattgttgatatacagcagatgttaatcatgtatactttccatttcttcatgtatactgaatattaaaaatatgtgtacttaatggtatagattaaataaaattaatttctagtgtttcgtcaaagacattcttttagtgcaactggctttaattttattcatttatttatttacttatttttactgggaatgaattacagtgaagaatacaatgacagtatagtttgttgtcactgtcttgataagtgttaaggctaggggtttcattgttcttccaaatgtcaacacagtgaaaaaggtaaataatgtttttgtatcattatgaaaatagtttggacctgatgaatcatttaaaaagtctcaagggaatgcaagagcatctgtggaccacattttgaaaataactgctaaaatcacattaagaattttttggccgggcacggaggttcatgcctgtaatcccagcactttgggaggccaaggcaggcggatcacgagatcaggagttcagcctggccaacatagaaaaattagctgggtgtggtagtgtgcgcctgtaatcccagctactcaggaggctgaggcaggagaatcgcttgaacccaggaggcggagattgcagtgagccgagatcctgccattgcactccagcctgggcaatagagtgagactctgtctcaaaaaaaaaaattttttttttgattttttggattatattctatatgcattaaagactatgaacattctgagaacatgactgtgaaaagttttttttatatgttactgaatggaaggagggttagaaatcagcagagtatgcaaaaacagagtaaaacaaaatgcctaggaatgaaaaaaaaaagagagagagagagagagagtcagggagagtaagataaagtttggtcccagagaagatacagtcaagattccactttttgctattccacagagatttcaggaagaaaaatcacactcctattttctttttctttgcttactgatttctatttagtttcttttttttttttttttttttttttttttgagaaagcgtctcactctcttgcgcaggctggagtgcagtggctagattcttcttgagtatgctcaaacttcctttttggaatgtcttccaaaggcactcttgccttcatttgtacaagttgattgaccctttaaaggccttaaatattattgtgcgacctcacagactcctcaaatcacctgaaacctgaaatgctgaggcccaggtggcactgaaatgatggtattctagacctgacaccggactgttttctccttggttttgtcccaacacactgacatacatagcccaaaatactactggcctttttaagtggcatatcacattccagggtaatatcaaaactgctgcctggtagcatttgtgaagtctcaaagtaactctttccaggattttcaaatccactgaatttcttagattgaaatatgtatgtgacagaattctcttagctttctttcctctatgaatatgtaattggaaactctgagatccggtttctcatctttattggattttttctttaatcttaaaattatgaatatttgctttacaataatctagataaggagtccccaacctttttggcaccagggactggttttgtggaagacagttgttccacggacattgtggggagtgggggctggcattagaatctcataaggagcacacaacctagatcctgtgcatgcacagttcacaatagggtttgtgctcctatgagaatctaatgccgccactgatctgacaggaggcggagctcaggctgtaatgctccctggcccactgctcacctcctactgtgcgacccagttcctaacaggccagggaccagtactggtccgtggcccagggtttggggacccttaatctgatgttactaagttacatcattaataatctatttctcctcacacagatttctttcctcacatcctcaacacatataatttcacatctccaaatgcagcattccctaataattacccttcttactccattctgccacctctggctcattttcacttgccattccatttgataatctagtaacttcattttgccaacttgatgaatttggttctaagtagtttaaaaatttaaggacatactatgtcagtatttacaggtgcttcttatttattcttcagtattctcaaatgttcaatttgaggtcaagttttgctaaaaacaactcattgcaaatagtagatgttttataaatataagataaatttcttaaaattcgtgctgagttctaaagagaaaacttaggttaccaagtaacatgattttcagaacaccaccaatttgctatttcaagtctaattttatattagaccgattcccaaagcttttccattgttacaaaattttcaaaatactgtacttttattatacaaggtttgtggcctagttttattaatattccaaaagacaaaatattcaaacattcaattgtttcatcaataatttaaactaaatttactattttgattaaagatacaatgagtatctttgcatgaaatagattactaaattctatttgaaaactaatgtacacttttattctagtttttaaggcaacatatgtttattttgaactttattttaagaaaacataccaaaacaatgccaaattgtttggtaagaaacaataccaaagcatttgaaaaaataaattattaacaataataattttgttgtgtaaaattgtgagttatttcatcattttattaatttatatttcccttttgctttatgtattacttttgctttatgtattacttttgtcataagaaaaataagatgtaatattctatttaaattttttttttgttttatgcactttatgttccttttttatgtactttatgttccttttcctttatgtattacttttattataagaaaaaataagatgtaatattctatttttaaaacaaaaactttataaagaagaaaacagaaatcctaattctataaaccagagataactattatattatcttcagggctttttctaaggaaaaacatgtttgttttttttccgtaattggggccatcctagatatatatgtttgtaaggtactttttaatatactattataacctgggcaattttatatagaattaaatattcattgaaacattatgtttaatggtactataatatttcatcatttgcctagactatgatttatttagccattctttcaaccttccagcattgtgtatgtagactgttttcttttttcttttctcttttttttttttttttttttttttttttgagacagagtcttgctctgtcatccagacgccaggccggagtgcagtggcatgatctcggcttgctgcaacctccacctcccgggttcaagtgactctcctggctcagcctcctgagtagctgggactgcaggtgcacaccaccatgcctggctaatttttttgtatttttagtagagacggggtttcaccatgttggccaggctggtcccaaactcctgacctcaggtgatctgcccaccttggccttccaaagtgctggaattacaggtttgagccactgtatctggcctatgtagactattaatctctccaattttgtttgggttgaattagttttcctatatggggatagtttggtggaaatgtcagtcaaggaactgttagttaagtttactcttaactaaaaggatcagattcatgacccaaacttgaccaaccagatgtttacttcctggaattttggtgttaaacatgaatgtcaggaaaaaaaagaaaaaaaaaaaaaaagaaaaagaaagaaagacaaagagcctgaaagcagttgagctgattcattctagattacagcaccttacagaaaccaccaaaagtctaccaactgggctatctgctcttatagttttctctgctcctggcatttttcagtctagattgtagctatcccttaactctgtgaactataatatcttttgaagacattgcttttatacttaaattaacctgagtcagtttcagttacttattgtaatactttaatttttttttaccaattccccatgaattcctaattttatatccttttctgtcactttcctcactgaaataaatgagcatcttaattcttatcacagatcatgaatgtaaatgtgacattataggcacagcagtggaatcagtgtcaccatcattttatttctgcccccactttgttagtcatcatgcctgtaattacaaacctaattaattgcctttattagaatcttaacacatacacagataactcattattatccagtaggaggagggtatgaataatgaaaatccatcatttataaaataaccacaacagtttcatcaacaacaaaaaaatatcaatttaaccttctttgcttatgattttagtagtcataagtattgccagagacaactgttagaggctgaattgtatcctccccaaatccatatgttggagtctcaaactccggtacctcagaatgtgactgtgttaggagttagagcctttgaagaagtggtttagtgaaatgagacttttagggtgaaccacaatccaatatgacttgtgtccttaaaagaagatgaaatttagacagaaaagagacaccaggaatgcacatgcacagaggaaaagacagacatcagcaagccaaggagacgggctttagaagacaccaaacttcccagtaccttgttcttggacttcgagcctccagaactgtgataaatactgttatttaagccaccctgtctgtggtactttgtcatggtagcccaagttaactaatacagaaaccaaccctatttgaatggcacacctctatctcaagttcagtagtttccccaatggtatctgtgaaacaaaagcatactagcaacatatattacaaagaacatggataatatttgtgtaactttgggaaagcatgtgcaatacagtaaatatgtttctttggaataaatataacctttccctggaaatatttgctcattatctccttaaattttcagtggagtcacaaatgaatatgtttccaataatgagaagaaacattttgttgtgaagttagatcaataaagtgtttaatagttaagggtatatggatcagttttctgattctttaaagttatgtggattctcaagaacaaagaatctcactgaccttttcttaaaagatatatccctagtacccactgtaagaaataattgatgctaaaatcataaacgcatggacaacaatgttaataagacaattcaccggggaaagaattgtcttttcaacacgtggtgctgggacaactagatatgaacaaacaaaagagtaatgctgaacccctacctcacattatatgcaaaaagttgactcagaatgaatcctagatctaaatgcaagagctaaaattatacaactagttgaaaaataatagaagtaaatttttatgacctcagattaggcaacggtttcttatacatgagactaaaagcacaagtgacaaaagaaaaaagttagagtagattcttcatcaaaattaaatctaagtttgtaggtagagcaccaaaggagaaacaggcaatatgataaggcaaagacttttgaccatttacagagaaaagctaaaatgtcaggttgattctaagttagaagagaagcaaattcacattttctagagaagaactacagtgtccataggtaactgagaatgaggggaagcaaatagtgaaaaaaatataaaaagataaaccattggaatatgagtcttgaaggaataaaaatatggtaacaaaagttttaacatagatgaaaatgaaagctgatgtttatcaaattattttgaaatcacattcctactcattcatttgcaaaaaaaaaaaaaaaaaaaaaaaaaaaaaaaaaaaaaaagatttgttcaaatccctccaagcagctcctgtgtcctggccactatgggggatgtaaacactggttttcatgcttagtgtctctttcttgcctgcacctggtcagtgtatcatttctggaggaagaaaaactgactgggtgactatatcattctaaccaatgatctcattcaaacaatttttttttcatcaaatagtaccttttcaatattttttaatttttaaaaaagtttttagacaagagcagtagtgagaagaggggaaagcgtagaacaaggagtttgatctgtaactgactgtgaacaatcaactgagataactcactacctttggatcagttcttttcaacatttttgaggcaatttttttgcattctaggaactgcaacattttttcagagaactttacaaactctcaaaacttttttttgtgaaaatgactgatttatgttttttttaaacctaataacttgttaacattgaatgttttaaatttatttgacataactctttgatttgtttttttaaaagtcgggggcagttagagccctaagcccaatctctgagattccacagatctggctgcacacctctatggtgctatttctgttcgtttcttttactttcaggatcacccacaaggtttgtgccactcttcatacctgtgaggcacttcaccctttagcacctttgattcaatccatcattggcctcattagatttctgcttaaaaaaactttttctccacctctttcattattttctgtttgcatgcccctctcatcctcactatctctttatcttgcagtatttttcttcaaagaacttacatttactgacatttctttgcacattgatttgcctactgtccaactctatcaccagactgaaagctgcatgtgggtaggaattttgctttattcaccacattcctgcacttagaacgcagacccttctatcttctattgtacaggagagcttttttttttttaattttttaacaaatagcccggtgtgatggctcactcctgtaatcccagcactttgggaggctgaggcaggcagatcacttgaggtcaggagatcgagactagccgggccaacatagtgaaaccccatctctacaaaatacaaaaattagccaggcatggtgacactcgcctgtagtcccagctactggggaggctgaggcaggagaatcacttcaacccgggaggcagaaattgcagtgagccaagaacgtgccactgcactgcagcctgggtgacagagtgagactctgtctcaaaaaaacaacaaacaaacaaacaaacaaatggagtggatttgggtaatcattctaaaccaaactgtttttggaattttggcatgtcagaaagcagatgaattacagctcacatgtacgactgcacccaacttcagtcctgagtctcttggctaagctgtagctctaccatcacatggatgatgagcaaacatcaagaacacagacgccatggccacggtgtggctggactgcttggattctgccacttactaactgtataacccagcaagttaattgaacctcactgtgccttggttttgtcacctgtaaaattaacaatagtatctacctcataggattaaatgagatcatatttgcaaagtactgcttaggatagtggctggcacagagtaaatgctatatgtttttgataaataaaacaattaataaatggaaatctaggaatgtggacaaaatttaaaagttggaaaagcaaactttggggcagcttggggaattctgtcacaacttatttttctgatcacaagtgcaatgagaataaatttcttcccaccctaccctaaactaatgcaatctcaattgagcggtggaacatgcttcattcactaattagaatttaaaaaggaagtgataacctcacggagcacagccccattgaccctgagggtgactatacaggaccttcaattgctgattctctcccatccttctctgggatctgtttctcccaccctccccattctgaggtagctggaagagagtaggctttgtgccctttggcgagtacagggagaaaatagtaggttcagcctctccaactgcccagggagaaagcaatacctttcaaggtccccaggctaaattttggagggatgcttttgtgtgtcactgtcaggctcacaccgacataaacccttgagaaatgcctggttggtgacgtcctagaggtaacaccaagcaagccccagattttctcttcttcgtcagcaattcccagatgaggtgctcttgtgtttaccctctctgattgtctggattccctgatagtaccctctatacaaggaactagaatgtttcttactggattcctctgttggtggtgatagagtttactttgggtatctagtcggtctggttgcccctggtatctctggttggtacaacagaatcctgactgagctccttagtgccttcttgaatactgtataattaactaggcctccaattgtgccccgccttgccccagcccatagatggacaatccctcctgccatgtcttaaagagaaattaccataataaatgactctccagacagcacatttcccagcaagagggggcatgtaaaccaagtctattagtattggcagcaaaatccaatgtgttattgttaccagtatgaacactctgggtatcctggcctcctatatagatatttgaaacaaaacagacaaacaatgtgaaggaaggaggaaaaacagccacacaaatgagttacagtgagtttaatgaaaactaattccattgctgggtccatgtgatataaccagccacttgtgctctgttctagtggtttataatgttacctcaccctctccaagaaattggtttcccgtaaatctctgtggccattcattcctgtctacacattatgttcctaaaatagacaccagctaaaaatctcttccaggagctttgtgaaggaaggcctaaattgcaaaactcctcctagaagagagatgtgattttgtaattgcttcattgcaattacaaaagcaacaatcataaaagagagttttaaaagagtttttcaccacagtcattctcctgaaatgcacagctgagggaaagaagaatgtcagatgccccgcgaacgtgcagaagctcccagttgcatcaccctggcgtgccaggtattgcagcaaataggaaaggtaagctacccacttctctgggcaggagaaactaaagcaggaatcaccaacctcagcatggaattttcctatttctgtctggcaacatcctcttgggatgatttaaagtgctttttggagaaatatgttctgttactatactagcgcatcagaaataccacgtgaacctgtaaatccatagaagaagaagacacattttataggtgtgatagcaacagcaattggcaatttgcaagtttgctactgcactcagaaatatttagtcacatgcacatattgacagtaatataccctgccttgacttaattgttgcattggacaggtgaaaagcacatacccaccactccagaccgatttgttaacaatcaccagtgagtaatcaaagagaacaaaaagaaatgagaagtaaatgcagcaagtgggtcgggtctttaaacacatacctcaaacaggtaggagtcaggaaatccatgatagcaaagacatttggacaagcctcacctccactcagaaataattcttatgctgttctgaaaagcaagacggttcacactaggaactgagcagtatctgcagtatcattgctggttgtgacctctgtctaagtaaaagtaagtcaatgtttcctatttggcattggatagaaaaggggactctttaccactctgctcaagctcttttttagtgtggctcaataggagttggcagaggtggggggcggaaatcattgccccttccttgttcaaggcatgaggcatttcttctcaaaagcccagcctcagcctcaggaagctgaatacccctgcaatgctaggctccagcagcagccccgctgccttctttcttcctgtggagttaaaactgagatctaatttttgctccgtccttaagaacaatatgacctctattcccagccagctagtccacttccaaagcaccagtgaaggagggggcttcaacaggatcaaaagggaccttgaataggatgaaggcaagcaaaggcaagaactggccagatgccaagctatttcaggccaaagaatcccatcttctatcaaaatgctgaactgcaaaacaaacctgatttcagttcatggaaggttgagagaggaggggggaggggaggggaggagaagaggaggagagggaggagggggacagttggtctgaatacacatacaaaaatggacttcctgctctgcccaaactgaatttccatggactctttttccaaaggaataactggaatgaataaacttaaaatcaagatgaaacaattagatggcttacctgattaaaaggaaaattatccatctgcagtgaggaacagcatcacccaaagacgagatgataacaatgtgccttcagttgcaattgttcagattccttcttgcaaaaggtgtcaaagtatttacaagggctgcagtctcactggggcagaacacacagacacacaaacacacacaaacgcacacatacacacatgcaccagagacctctgcagtatcctctcggcttcatcctcgcctcactctatggtacctaatacaaatcagcaaatagcttgtttcaaaaaaaaaaaaaaaaagtcaagacagcaccttacattacatcgccatctagtggctaaatattaaacactttctcacaatccagatttatgatttcttcctcaacctcttttctctcagccttttttcctttcttctctgtaatctcccagtattgcttctccttgcttctctttcattccctattgctatataatatcatgaacctaatgactcaaagaggaaaaggtttgaaagtaaatatagctattttcaagtagtacttgaaaaactttagcattattttagtttgaaactgttactttattcctaatatgaatcattgttatctataaaaatgatatatcttataaataaaactgtctttttattccaccaggaaacaatcaggtggccctttattacagatctatggcttcacatttttctgttttaatattgtgttttaggattaggtttcatattatagtgaacagctcagagtcacaaaatgtgagttttacttcaacactgatgaacacatgcctttaacaaagccactgaagtcttctatggacatttacattcttactatcttcatctgtaattacagattaaacaagactttcaacccactctcaatttctatggttttactatattttactccaatgttttcccatcttgtggacacagcctaaagcttaattataataacacattttaataagcaaatatatatagaaagagagtccaattgcctattacccaaagatagaattataaaaaccatgaatatcagttttttctaagacaataaaaatccatgccaaactaattataactcttggaactgagagtagagctttttatgttatatattgtattctaaaatggaatcagccttaaacattcagtcatacataaaatcacgattatgtgtagattagtcattggaagtaaatatttcatcctcattatttttcttttgccatctaacacacttattacaatcattgcatgtgttttatcatttatcaatataaccttcaatatttaatccttctcttccttattacaggatggtgagataaatactattaatgttattatattataattattcctatttatacttgagaacactgaagctttctgagccttactgaggtttattcaagaccacatagcttgcaaagcaataaaactaaggctgttggtcccaagagcccaaagaataatccactgttctttgcaacatacctaaaagttcaccattttttcctgttctagaatcacagaaaagtaattttgatttctatgtttacaaaacatttactagcccttaattatggaccaatgggtccatcttgtggatccatctttttatctataaaagaaagaaattaagtaagataatttcctgttccagctcaaaaactctatccagtgctttcccaaaagccagttggagtagcatgaacacattcatttgaagttactcaatgtctgggaaatgatgttgcccagtatctggtagagtcagggcaaagttgaaagaagatgaggagacaggtgatcaacaactggtaaacgattgccaagatgttagagatgaaaagagagtgggaactgcatgaactaacaggcaatttttttagaataatacattccatatgaatagtacttagagattagatatgtaaaaacacaaaataagaacatacctggccacatgttttaatgaattctaattgcatattataggtgccaatttttctgagtgtctgctcttaacaattcccccaatagttcttctcccctgatccttagtggtaaacctaccctcttgctacagaggactggagcaagagagggtatctacgcagctgacctggtcaaagagagccactacatgtgattctggcagctatggagtcagctttccctcaccatggggactcaggaccaggtggaccaggatactgaaatagcagccagccacacagatgtggaggaagaagtgacaaaagacagagacagactgtttccatctccagtctactcaagatccaaacactttcttgatgttgagtcccatgataaactcaaactccatgtttgcttaagtgaacttggtttctgttgaactatggagtcctaaccacttcattagcttcaagaaagttgccagtactgcatctatcaagtattattcatattctgggcatctgacacttcatttattcacttcttcatgcacctgatatatgccaggcacttttccagatacttaagtaacatcggcaaacaaaccagatcaaaaccctccctttgtggagtttacattgacatgtcagtcatatggaaaggcacaacgcattcagtgtgcacactacctttcttccgcctccatgtctttgttcacaaccttcacttctcttggcagacctttcatccatctacacatagcaaattcggcggatattttaaatgtctgggtcaaatattctctcttctccaacgtcttttctattttctcagcagatagaattcttttttcttttgttaattatagaacaattttatgttgtatcttatgaaacatggtcatttgacaagttgaaagcattgagcataaggagataaatgactattctcatacagactcctagaaaaggccaatatcccaagcatggcccaaagagtactattaactaacaactcatcattctgtacacagatacttcattcgtcagagctgaagcagttttacagtattagtaactttaaatcttccatgtttcagactgagcataaaggcaaaatatgagatttttattaaattagtgtaatatgcacttaaaatcacatatttattttttaaagttagcagaagatattaaaacaaaactctgtgctaccctatgtcactactacacttatcccatttgaccttgttctaagagttttatatatgtatcttatttggctcccagaatgtaaactccctgtggaaccagctttgcattttatttatttttttgtagattaatttattgagagataattttgtctctttctcactgttacgtttccaacttcaaaaaatgaaaaactaatcttcctctgcccccgttggtaaagttagccattccaggaacccctttgtaatcttgtttcagaagctggaaaaaattagctgcctacttcctaggtgacaatacttcaatctgtaatgcatgaacctgctaaacaggctgagggggcatggctgtggcttttttatgagagttcctaacaaggaaaagagaatgaaggcgtaagatgtcatttagtctttgtaagactccgtctctgtaagactccgtctctgtcctgtgaatgtggttgttactttgttatagctctgtcagttgcactgctcagtgccaaaacataaaagggaatattataatgggacataatctctgtcaatagattttgggtattaaagagagcgtgaggtcactcaggtggaaaaagctgggccaggtaattttgtctgttagttttacgacataaaggagagtctctcgatgccattagatcttgaaagagttcaaagagagaactatctcattatcagaaggctgaggaattagtgtaattagtatctgaatattctttaatattttcttgcatagaaaataaaggtaattggttatcaaaaatattctttcaaatgtgtatctcctggagttgtggagttctgaaactttaaccagctgccttatgaagagaatttattaattaactttatgcctgccaaggagaaggaaaccattcttaatttttagccaaaaatttcccaaagtgatgaccaaatcattatgttttgagttccagattcccttgtttagagttataaatgacatttgagttttaaggcagaaatgtttctaaattcccctgtcatttgtttgggaatctatagtcactgagcaacatgaagctgggtctcccctctcttcccaccgcaggaaaggaattggaggctggaggcgaacttgagtaccttgaggtggtatcccaaaggagatggtggtgacaacagacaagtctagatgttagcaggtcttctgatgaagtcggggagtgatcccaacacagatagcaaatgctagagtttggatttaaactcagaccttaagattttagatctacaggaccactgtatcactacaaatcctgactttgcccccttttgattggaataatcagataaagcacactactgatgtgatccttggtaaatgtaatttactacttaagtactttgcttttgtagatgtcaatttcctagtggtttttttttttcttttggtaaatgcagcattctgcaaaaatctactaccaattccttgctctcacaaagcattcaccaacactgtgccactattttagaaatagaaaccatatcctagccgaaaatgataaactcatatatttccttttgagattaacctgcccttttgaaagggagtcagaaatgaatgtgaaatttatttgctattagacaaataaatgcagaaactgcaattaagaactctcttttaggactagagccaactagtttttctgcaagtttaaagttacaattttttgatggcaagaattggccaactgatttcaaaatatcttataggtactaaagtggacttttgaaactctggtaaagtccatacattccataaattaaaaaaataataatcagccatttttttcaaatatgatataaaaatatctgagggctcctcccctccccgcaactggaattcactgaatcagagctgctataggcttgcattttttgatgcacagataaccagtttttaaatcacttgtaatataatgaacataaataattgaatttttttttcttacagatttgattctgaagtatttttgaagtatctttagaaccaatgtgcttgtgggcacacattacactatttaaaattttattaaaagtattttaaaaatccttagagagagaatgccagttatctctctctctttctggtagtggagaagaaaaaatagtataggcttttcttaactcaccacaatgcagtaattaaaagcaaaagagaaaggagggaagttgtgggattatgatggagataatcagattccccagttgccctctgccttccctgctatcgagacaacgcacagaagccagaattatgtctgcaggtgattatttcagggaagcagttactccttgttggaagattcactgcaatttcctttcaattacataggcagacattggtgttggagagggaaataacaatattcctaaaccaaataagtagcttttataaacaagacagaataatacatgaacctgatttctcaaagggaaattaagtatatgaatgtcaatcatctgatgagattagcattacaatataggttcagaatgagtattaaatcacaaaattactttttatcacttgatgtaatagcattattcctctgattatatcaccaactgaacagcacttcaaaaattactatagtgctctgtatatatctttaattttaaatcctttattatttgggggcctggtttatttttgatcttttcttctttagctaacgtgtaagaagacattattaatatttagtgaagatgacactaaatgtcgtttttcaaaacaacaaactctgccttttcctaaacaagcagggagccattatgccttcactgttccgcttcctttgtttcctctgttttcaggaccttctcttctttgaccgcatcttcctccaccctctatcggtgcacctctccacggtctgaccccactcaataatctctttgaaagtaagaactatgacttattttttttgtcattgttccccaaacatatcccaagtctgtggtagaattaaggtagtttctggagagaacctgataacatctgctgagtattgatgaataaaaattccgtaatagacttccaacaaaaccctggagtagaataaaataactttgtaaacctcataaaaaagaatgtcaatttacataaatcattaccattgctttatcgatagggttttgctaatcattgagaaattgtggagctggaaaagtctcagagataaaccaggcaagtgttcttattttggatatgaggaaactgatgccaagagaggtgcagtgacttgtccaaggtcacatagatagttttataccacaaaggtccattcaagttttcccacagtttaactctaaaggaaattaatattgagtaaggtacatcagcacataagaagcaaaatggaagtgagtgaagtatttctagatatgccacaattgattttcactcatgttttgacagagagatggatgtgatgaagggtatgaatgcagttactgtttaagaaggtgatggactaaccaacattggttttagcaaagaataaagaaagtgactgtccttcaatctagctccacatgcggttcttaaatattaaccacaaagtactcaagcccaagggcacgagctctgggtatgcagagtgtagcattgacagctttcaggaatgcaggcccaaagacagctccagaaaatatccaggaagcaaactatcttgaagttctatactttctttgaaatgccaagatgtaatctaaaaatatgtgttctacttttttagtctaataaaccacatttatatgatggttatctgtcatatggggagacaaaattcaacatttcacatgcctgagctttatacccctcctttaaatgtatcaagatttcataaagctttggttcttcagaaaagatcaaggtacatcacaatatttaaagcattatctccatatctattgccacaggaggataaagagaaaataaacataaatgcaaataatgaaaatgcctgagcaatcataaagaatgaagttactgtgtggattctattctgtgtttatgtgttctttcctttgctcttaagtcagttaaacataatgcttgggttctttcctgatttatttcattcagcaatcccccctaccccccgacatcccttgcaaagatgaatcaacaaaagctattaccaagaacaatatgattgattacttattggaactcgaataccaattttccacttaagtatatctttatatcaatcacctcacttgcctacctattgaagagtttcaattagatttttttaataaagaggactttctttactctaaaggatatagctgatatttatgaagacaacgctttatttacagaataaaactgaactttgccataacttagcataagcaaatatgtagtttctgtttccctaaagaattcctgtcaacatctttttcctttcatgttcaaaggcagaaagtcattgactttaccaggagcacagcaaagccatctgtaaagtatacaagtgtcgctagaattaggtgctaccatatttcttggggaaattaacatttttgacacatctgtatgcagttccaatcttcggatatcaatttacaaactcacataaattacatttggttacatcttttctttttgtttctttccttgagaaaagcaagaattctactctaggccaaataatggacagaaatcattagggtccactccagggactgaggccctttagaagagattggcaagtgactagggaaaaggtacatcgaaggtcagaaaataatgacatttagcctagttctcctcgtgattccttggaaattttggggcccatgagctcagttgctgcttctgggattgcccctattcatatcaaatagcagagaactgagatgtcttacccacacctgagaagattcggatgtgagcatgggatagaggtgctaggcagcggcactttcatgcctaagtgcagtctctcatacctgttcatctgcagtggcatgaaaggcaaacagattcttctgctcattatgggttgttgaaatgacagaaccactttgtctcaacattttctatgacacttgatacataaggaagctcagagactaaagtccttgtttccatgttgcactaggtctttttgaaagtctcttttacattctgattgctatcatgacatcaaagtcacctgtattcctcatctttgtggggaagagcaggctaaataaagtaggtaaggacaccttctgagtctgcacccctttaattgacacataggggatgtgacccctgacgtttctgcttcccttattctttctgcaactaagcaaacatagaatgtggattttcccatgctcttagcaaggatgaaactcagcgatcatttgctctacttcacatggtagttgtttctaagattacatatcatatatatgcatatatatatatgttatgttatgctacacacacacaactgctaatgagtgttctctctccccttttcttgtccctctgctctctaggacagcagtagctttatatgtatctctatctgccctaagtctcctctcttgggcatcacaaacagagttacccttccatgaaccatttgttgctttaaaattatacctcagatgcagtcatggtcctagcagaaagtagatggtacattcaaaatggttaaaataaaaataattatggagaaactattgaccaagtgggttaagatggttgatgagtgcccaggaactagcaatagagagagccaatgccattccaggcaagagtgaaagtggcaccagattccggtgagagctagagctttagaagacccaactgagaggtttaactaaagaggaatgcagctgcttttttaagctaggaagtgaggtgtggtcggggagactctccaattttctgctaatgcctgtcttgggctgcattcaaagccaacggatgaaggaccccaagtttctcaatccctggaaagtggacttgaaagtctttccctctacttgtccattattccacttctaacctacattttaatactcccaacactctcttccctggtctgcattccttggagtccagtgctcctgctagtagcccttcttccagggctccagcatttgttgggctctgggaatgttttttccaggttggcagttgtgaagggctggtgggaactggggaaaataacaatgtgtctcatcttatctctaaaaacatctctttttctttgtttaaaaagcaaaacacatgtgtctaaaatattttacagagatgaacaaaaatctttatgataaaagattctatttaataccctaacccttaatacagtgcctagtatatggtagtgtatgatatggtttggctgtgtccccactcaaatctcatcttgaattgtaactcccacaattcccatatgtagtaggaggaacctggtgggaggtaattgaatcatggtggcgagtctttcctgtgttgttctcatgatagtgcataagtctcatcagatatgatggctttaaaaatgggattttgctgacacagctctctttttgcctgctgccatccatgtgagatgtgacttgctcctcgttgccttctgccatgattgtgaagcctccccagccatttggaactgtaagttcaataaacctctttcttttgtaaattgtcatgtctcaggtatgtcattatcagcagcttgaaaatggactactcagtaaattggtactgggagtggggcactgctaaaaagattcccaaaaatgtggaagccactttggaactgggtaacaggcagaggttggaacaatttggagggctcagaagaagaaaggaaaatgtgggaaagtttggaactccctagagacttgttgaatggctttgaccaaaatgctgataatgatatgaacaacgaaatccaggctgaggtgatctcagatggagatgaataacttgttgggaactggagcaaaggtgactcttgttatattttagcaaagagactggtggcattttgtccctgccctagacatttgtggaactttgaacttgggagagatgatttagggtatgtggtggaagaaatttctaagtggcaaagcattcaaggggtgacttgggtgctattaaaggcattcaattttaaaagggaaacagagcataaaagtttggaaaatttgcagcctgacaatgcaatagaaaagaaaatcccattttctgaggagaaagtcaagctagctgcagaaatttgcataagcaatgaggatctgaatgttaatccccaagacaatgaagaaaatgtctccagggcattcagaggccttcatagcagctcctcccatcacaagcctggaggcctaggatgaaaatgtggtttcatgggccaggcccagagttcccatgctgtatgcagcctagggactttgtgccctttgcctcagccattccagctatggctgaaaggggccaacatagtgcatgggtcatagcttcagagggtgcaagcctcaagccttggcagctcccacgtggtgttgagccggcaagtgcacagaagtcaaaaactggggtttgagaacctctgcctagatttcagaagatgtatggaaacgcctggatgcccagcaaaagtttgctgcaggggtggggccctcatggagaacctctgttaaggcagtatggaagggaaatgtggggtcagagcccccacacagattccctactagtgtaccacttggtggagctatgagaagagggtcaccatcctccagaccccagaatggtagatccactgacagcttgcactgtgttcctggaaaagccacacttaatgccagcctgtgaaagcaactaggagggagtctgtaccctgcaaagcaacaggtgtggagcttcccaagaccatgggaacccacctcttgcatcaacgtgacttggatgtgagacatggaatcaaagatcattttggagcttaaagatttgactgccctgctggatttcagacttgcacagggtctgtagttcctctgttttggccaatttctcccattttgaatggctgtatttgcccaatgcctgtactcccattgtatctaggaggtaactaacttgctattgattttatagcctcataggcagaagggacttgccttgagactttggattgtggacttttcagttaatgctgaaatgagttaagactttggaggactgttgggaaggcaagattggttttgaaatgtgaggacatgagatttgggaggggccaggagtggaatgatatggtttggctgtgtccccactgaaatctcatcttgaattgtaactcccaccattcccatgtgtcatgggaggaacccagtgggaggtaattgaatcatgtgggtgggtttttcctgtgctgttctcatgatagtgaataagtctcacaagatctgatggctttaaaaatgggagtttgcctgcaaaaactctctttttgcctgctgccatccatgtgagatgtgacttgctactccttgcctccagcatgattgtgaggcctccccagccacgtggaactatgagttcaagaaacttgtttttcttttgtaaattgcccagtgtattagttcattttcatgctgctgataaagacatacctgagactgggtaatcatggcagaagatgaaaggcacatcttacatggcagcaggcaagagagaatgagagccaagtgaaaggggaaaccccttataaaaccatctcgtgagacttatacaccaccacaagaacagtatggggaaaactgctcccacgattcagttatctctcaccaggtccctcccacaacacatgggaattatgggagctacaattcaagatgagatttgagtggggcacagccaaatcatagcaggtagagactcaggaataaacatatggatattcaagcagtactatttttagataaattctaagaataattttagaataataataattgttgttaattttattgaggacttaatatattttgggaccttcaaacctcacaacagtctcataaaatagttgctattaccatgttatcttcatgaatttataaatgaggcaactgaggctcagagtagttgagcatcttggccaagatcacacagtaacgaggtgactaagtgtgattctgaaaccagcagtgtatctccaaagtacctaatcttaccataaggccatactaaaactctccacaatatcacattattaaaattatggtggaaagtctctgcaattcgagttcacaggcaaacaaacagaagacaatagtctttctttactgctaaggattacatcacattaagctcatataaggacataatgggggagagacatttctacaagtagctgaccgaagatagtttttaggtgtatgatcagtctgtagcctggattcttgtcaaacatgttagggggcagcatgtggcagggtgggagggaggcaaatggagatcttccttcttacttgtctcagattcttcaatcttccatagcaagtgaaagaatataactatgtttggacgtactctcaccaagttaacaaatacactaaacacatgagtagtgaggggagaagcatgcctcaatctggcaaagcttcaatctccagaagtctaaatttgttagaaatgaaaaagctagcaaagcagaactgctgatcgtgaacacttaacagtaagcttcctttggtggaagcttcatgttgcaaacatcgtatttaattaggtgtttttttctcagctcattttctaaaaacaagtgcttttcggctctgcttgatgtttgtgaagacacggaccgcgcaaaaccaggatactttcagaattttaaaaccttgcttctgaaagtgtggccacatactggcagcatccccacttcttgggagcttgttgaaaatgtggactctttggctccacccagaccttctaaataagaaagtgcattttaacaagatttccccaggtgattctgtgcacattggtgtttgagaagccctggctgtcacatctggcctcagctcttaaagcctactcacttccttctgcaccttgaacatgtaaatcagccattctgccctgctcaccactccccgggtgttcccattcccctttgcagccctgcttgtacatactatttagatacaccaagcaaacccaatctactcttctaagtcacatttctaatgtcaattgacttgagtggctcttgaagtaaaaattaactttccagtttctcttccctcaggcccagtctgcagtggcaatcgctgttaatttttttttttttatcttctttagaattcttgtgtatatccaagcatctgaaatatacgtgttttatatttttcttttttttataaataacattgtaccagacaccaggcatggtgtttcacacttgtaatcccaacaatttgggaggctgaggtgggaggattgcttggggccaggagttcaagaccagcctgggcaacatactgagaacccatctccacaaatatttttttaaaaagaaagaaaaacatcacacaatatatatggctgtaaacctagtttaagttacataatttatctctaattagttcacttattattgcttaaaatattttgttctgtatatagatggatataccaaagtttatttaatcagttctcagatgataaacacttatgttattttctttctttcttccttttcttttttttttttctatttcaaacaatgcggatgtatacatttctttacaattgcatttcccacttgtgcaaattttcctttaagatctagtctcaggaaatggatctgtcaggtggaagggtatgtgccttttaacccagtaggtatcaatagatttccctccaaaggtgtggcaccattttatattccagaacagcataagaaactgtttccatcaccagaaattatcaaacttttttctttgttgactgggaagtagaatctagactgtcttaaacttatctaggaatttctctgaggcatttatgagtagacacaaagagggtggaggagaaagaggaggtgcattctaagaagaggagatacatgtaggatatatgtaaagttgggtctgtggaagtggctagagtctggagaggtaggcagacagccagatcagaagggcctggcacacctgctaaagagggaaaactggaaccgcattcccaaggaatccatgaaaatatcgtgttgagaagataaaaccaaatagtttgctttttatttccacaagtttggaggagccatctgtttcttgtcagggcattgactgataatagttgtgtctttataattgggttgttttctcctaaaactcaatttagacaaagtaagtgtcagtgtgggagggttggctaattgttaggaagcaacatttggtaaatctggaggccaaacccaaaacttttatatttttatattcctggttgtgcttactactataaagttaattataatgcttttactagaagctgtacatttgaaatcaaaacactctatcactgctactttcccttctcccagcatgaggtaacaataatattctttaggaaatttcatatggaaggttgacacctgttgtactttccttacctctctgaataaaataattccaacagaacactgacaacttttagaaatccaatttcactgtttcacttgctgatatggtttggccgtgtccccacccaaatctcaccttgaattataataatccccatgtgtcaagggtgaggccaggtggagatacttgaatcacgggggcagtttcccccatactgttctagtaagtgaataagcctcatgagatctgttggttttataaatgggagttctcctgcacaagctctcttgcctgcagccatgtaaggcgtgtcttttcttttcctttgtcttctgccatgattatgaggccttcccagtcatgtggaactgtgagtccattaaacctctttcctttataaattacccaatcttgggtatgtctttattaccagcacaaaaacggactaatacactcgttgaatataaaacagaaaaaggaatgccactttatcagagagctataatttcatttgaaacaaaacaagaaagatttattttttcagaactcagcatttttttttttttttttgagatggagtttcgctctgtcgcccaggctggagtgcggtggcaggatctcggctcactgcaagctccgcctcccgggttcaagccattctcctgcctcagcctcccgagtagctgggactacaggcgcctgccaccacgcccggctaattttttgtatttttaatagagacggggtttcactgtgttagccaggatggtctcgatctcctgacctcatgatctgcccacctcagcctcccaaagtgctgggattacaggcatgagccactgcgcctggccagaactcagcatttttatcaaacaaattccagatcctaagacatgtgtgactaaggatgtattttggggtaaatgaggaaaacaaaaatgttgagacctttacttatcttcaataatcaatgcatctccaaaatggcgctattaaatctaatcatcttggatttggttgatatttggatggtcatattgccgagctaaactcctttacctagaatattataattagaaaaaagtctgaggaatcatctaattcaggctctcagttgacaaagaatttaccttactttggtaaaaatttgtttggctttatgtggaggtttctcaaaaaactttgaataattattttctgaaataatattctaaattggaaattggaataaaagatcattcacgttcatcttgagtattcactttaagactaaagagggaagtgactttgtgatccaggtttgtgacattgtattttaaaggaggaatttatatttgatcttgggaacaatttttcacattcaaagtctgagaacatctccgtatcaaacccaaagagattttctcaagtgaaataaagtgaaacaaagaaagtagcattagcagttccgagttgcagacagttctttttaaaatttgttttttggttcttccaggcctcatttgcaagttgctacttaattaactagggtggttaatgttaggtaaagtccaaaatgtaaaggaactacatagcaataacaatatttcagtatttcttcaataaaagttactgacactctctatatgtcaagcactggagggtgccagtgaaaagagatggtctgttgctatgttctgcattttcgttggtgaaaacagagaagttggctgggtcatcagtgtggtacctctggtaaagctcaagtatagggaaatttaattcaatctcatgtttgaattattccctcttaagggggtaataatcctattcccatggagttttttgagggcactaagtgatagaacacatgtgactatgactagtataataaatgatgtattaaaatcattctataatacatataccggaaaattaattaagcatatgatacgaataaatgtatgataagtcaggtaaaatgcattaatcctaggaataaaacaaagcactggtaatctctctgaaggtcttagagcaggaagactcttgagacaggtctttataaaaaatcacttagaaattatacttaccaatgtgttcaaactacatgaactattgagttttgctttgtaggatagtggaacgagaagtgaatttggcatttggagaccttgagcctttattttctcactgcaaaatgacagagataatggggcctatcttttagagttgctatgggtctcagaaaggatcatggttttttttttttttttgagacagagtctcactctgtcgcccaggctagagtgcagtggcgtgatctcggctcgctgcaacctccgcctcccgggttcaagcgattctcctgcctctgccttctgagtagcgcaccaccatgcctagctaatttttgtattttttagtagagatggggtttcaccatgttggtcaggctggtctcaaactcctgacctcatgatctgccagccttggtctcccaaagtgttgggattacaggcgtgagccactgcacctggcctaagtaatttttttttttttttttttttttttttttttgtgggggacagagtctcgctctgtcgtccaggctggagtgcagtggtgcgatctcaggatttcactgtgttagccacctggtctcgatctcctgacctcgtgatctgcccgcttcggcctccccaagtgctgggattacaggcatgagccaccactcccggcagggatcatgtttttaaaattacttgaaaatacatatatagtcattcaagtatgaggtattattattttaacagaaatatagctacctatatcttatattaggttccttaatccacatatatctcagaatagcacctaatttgaattgtagaatagtatattgaaaagaatctttaactgttggagaaaaatttgtgtgtgtgtgtgtgtgtaggcgcacatgcatgtgtgtgaggcttgtctacttctatcgcacatatcaggtcgagaaaatgtctgtactaaattgccaagtggtttaggtaaaaattcatgggaaggtataatttaaaattctgagactctagcttgtaacatttgtaattttaaggctaaagacatgaaaatgaacttaaattcaatattccttccaacagcctatgattttataactttatgattataccatatgaccccaactgccttctatgtatggtgaatggttctaaattgaaggccctttatcttctaaactctttgatgagtttgggcatctacgtctggatataagagctgtggagagatggactactttccatactaagaagagaaaaatttggagtgttcagatctctcagggaggggatgaggagcagagatgggatggggaagggagaaaatgcgggtagaagcccacatctttaataaaatttattaaattgaaaaggtgattggtgtaggtaagtctctgttaaaaactagggacagacagacactgggtcacttgacagagtggttaggtgtagtatacatgaaaccacgatgccaggacacagaggatgatgtaagactaagtccctgataagttgcagaaggttttggacttccactgactgtggtattggtagatacctgagcaagatatctgccaacagatatctaccaatagatcgtcacctagatcttcaagggtgcaaacaggtcccaccttatacctgagttatacaagtaaaacatgtcttcatttatttataagttttaacctacctacttccaaaaggataaatgatatatttgttgtattatttattatgatggaacttttcatagcggagctaatctaggtcagtggttctcaaatgaggaggaggtcagttttgcctttggtagacaggtatcaatgtctggaaatatctttggtcatcacaactgagggtttctatggacactttgtgggtagaggcaaggaccctgctcaaaattccacaatgtctgggacagaccccacagcgaagaatatctgacccaaatgtcaatagtactgagttgagaaaccctgatgtaagccaacctctcatcttaataaatgagaagctgaacatcaaagagggtcagtgatatgtgccaaatcacacagtgaacaaacagataagtcctctagtatttttcccattacagtatttaacttctaagagctaaagttctaaaatggaactgttggaaaatagaccttcttatggacatatttagacttaaggtatactcaataattgcataaatctttaaaacatagtactgcttacagtaggatatctaggcaaagatgaacatagaaaatttaatgacaatatgtatttaactatatacagtaaaaaccatttttataatatttaaccaaattacttcccagcacagtggttctcagacttcagcatgcctcacagtcacctggaggaaaggcttacacaaacacagattgccaggacccatccctagagcttctgactcagtaagtctgtcatgaggcccgaaaacatgcattcctagcaagttcccaggtagtactgatgttgctggttaggagaccccactttgaaaaccactgtcctagaatttagtaggtacttagtaaattttggcttaatattgtaaatattcaaacaatataatctcaccaaaaaatgtaatctcactttaacatagattagttaataatgttaattcccatttagaggaatacaaagatatatatggtagaatcaaaactaatttaaacctcatttaattcaaattccccattttaaaatgaaaaaattaatatattttaagcttattacaacaaagaagaatcccttttagcaatagccaaaagaaacaatattaaatgcaaatcaattatagacaatttgaacactgacattgttatctgaaagatatataaactcaaagattataagtacaattaagtatgtatccatcattttttaacttatgaggaatagtctgaatgccaaactgagtaaaacctggtctgatggggctcttatctcaagctatgtctagggaaaatgcctattgacttcagtaatataaaatcaggccccgagggaccataattgtctctttaaattatttgggaaatcatgtacatgtttaatcaactaaatacagcatacaattgtaagtggtatattttcatcataaataatcaatgtgctgctgttaatatggttaatagaatgaaaagtaccttcaggggaatttattttacgatcactcattttcattcctttaatttaatttttaaaatgcaagaaattttagatactttaaaactacctgtttacctagaaagtatgtgctaagtaacctgcctaatgccagtcatcactgagagacaccaaaacaaatgattgatagttaactttccattttgctctttgagatcacgtagacagtttatgcagactttactttcctaactcatgtcatcctgtccaaggtactgaacttcacttgccaaggacacacaggaagataaaccctctcaaatgtgctacatttgtcttcaactttttaaatatccatctattttttagattagatgccatctgttgtattatcatatctggttaaatcttattaaaattcctggccaatatatcactctgctgcggcaatcttaccctgctacctctctaggcttttctgcagcattcaataaagagcctgctattttaactaattgctgaggcaggacacagtgtgagagtctaaaacagaatcagcgctatattgtttctacttttacccatagagtgaacaactgttcatatcaaacctggaatcatcccttcaagtctcctaaacacagcacagtttgagccaatgcagttaatccaccctccttcagtgctagtgtcgaatggcgcttttgctgcagtattcaccttgaaactaagtaggcaggattcattatttgttgaagtcacctaactgccagtttattcttatacgatcacaaacaatcacaacagaagacaaatacaggcatatatataactcacttacaagggaagcaaatttgcagccagagacaagggcaacgtaacagccaagaactgcagtaaatctctttgagctaatagccacctctaataatgctctcctacaacacctccaatcaaataaattgtattcagagtttaaatatcaaatcaacattcattccttgatggttacagatgatgtccgataagcaaatttgaatttatgatttatttactccttaagtgtctcaaagccaggattactggaagacttactatgcttattcaagcatgctgacagaactgtaatctcagtaatttctccctgcacctctcagcatgactgacaggcatctgccaagactgtagtacataaactgctgaaacatgcaaaaatatttacccccaaaagatgtagtaaaagctcagcttcctccagcttccataacccctgaagtgttaatctggaggaacagttccatgagtttccacaggccagcagtgtgtctcctacactt

SEQ ID NO: 2 - RNA, 164521 nt, Homo sapiens
  source 1..164521: mol_type = genomic RNA
ataaataaaagttgcattccatgaggagaaaacaaaaaaacccatcacagtgaacaattgaattgctccgtggacatcatgcctttctaagcaagcattgaatataggagatgtatttatgataaccagagacagagtatgtatagcttggctccataggggtggtgttctcggttcctatgtctaccttttgtattttccagcccttccctcataatgttactgggaaagttaacagctagcataacattttgaaaacccaaagtgtttatatcaacaagattattcacagtcaaattttcccataaatatcactgggacctatatttcttttaattttaaccaagagtgaaggtagtgagtatagagccctggctttagaaactaacctttaaaaataatgagataatgacacagtgaataaagatgcatcagggttgagcaaagttattttttaagattagaaaaactgattttgaaaatgcaaaggcagacaaaaaggatcagtcaagagggaaagaataaagatagaagagaagtagaacaagtcatggagcaaggtatctgagaatgtagaaatgaatgggaaaaattgatctctgaaaagatataaaagtatggattgaaggaaggaaggaaggagagggagagaggaaggaagggagagagggaggaagggagaaagggaaaggtaggagggggaggtaaagtaagaaaaaggaaggaaaaaggaagagaatggaaggaaagaaaaaggaaggaaaaaggaagagaatggaaggaaagaaaaaggaagggaagggaaggaaaagggaagggaaaagggacttagatatttttcactggataggaaagaaattgaggaagtttataatgatgtcctcttgcttgttgctgaggtgaggggctgagttatctgcaaatatgaggagtgttctaacggaatgataaaggactcaagcagttgagtaaaatcaattgatattgcaaattatccacttgtgattttaagaatttcttggtgatgcaattttcccatctatacttgattgtctagagtattttcctcctctagtgcctttgctgccacactgattaaatcaatattgattgacaacctcagtgggatatttccatgtgccaggaagaatagtactatcagcagtacccaattcatggtggtttagaaacacatttattttcttatataataagaaattccagtgcacacatgaagaatatgcaattaccagacatatttgctgtctttagtgcgacaagtttatatagttcgagtgtctgggctttgtgatacagatatacaaacatacaaacttatgcagtagagttgtctgtcccaatggttactagacttttggatttcatgcaccagtaaaatacaaatgggaggaccgacaccaggttgccaattttccacttggctaaataaaatattaaaaccaatgacccattatcacgtattctcaccatcatttccaaagaacatttaaacattaaatggtattagtctttagaaaataatctaaaagatacaatttcaggataaaggtctttaacttggatatgttcagctttataaatatttatggcattattcttaattttctggcttaactatagacatatgaaaaccttgtcataagggtgctgctctgtggagctgtgtttggaattactatttatacccacagtgtctggtccccagcttaaacagcaaagtgccaccttctgttatccaaatcagatctgtttagcatcaaatactggggtcttaaccactatgccgcagatcttttctaaaatattcttattttaattaaacagtgattattatgaagaacaaggaatgtaatcatttctgtgacttttcaggaagattactgctaggaaatgagaatagtagttaaaaaaccagtatatattgaattaattaccaacagtagatctaattttgaaggtagaaattataaagtccagggcatacaaaatatgatagtgtgaacacgcagacataggcacttcagtaacacacagcaaaaaaaaaaaaaaaatcctcccctttctaaagacacacacacatctatacttttatctatgtctgtttacatacatacatatatatataaatgtaactcatttttctttgaactgattcaagaatgagctgcagacattgttgcattcacccctaaatactttagcatgcattttcagagaataagaacattttctattttcatggaacaggcacactagtcttaacaaaattaggaaaattaacactattataatactaataactaataaacagtccatattcaaatttattcaactttcccaataatattatttatctgttattttttaatttgatattccatccagaattgtgtttagttgtcatagttctttgacctcatggaattctttagcctttctttgtctttcatgacattgacatttttaaggagttcagtccacttattttatagagtgtcctcaatttgattttccttgtagttagattctggttttaaaattttgactgtgtaccaagaagtaatgtggccctttcagtatatcttatcaggaggcacatagtatcagttggtctcataattgatgatatctttgaaggtattgtctgctgtatttctccaaagtatactttcttctgtttaaattttctacttaatagagaagagatactttaagatgctataaataccctattcctcatcaaactttcacccatgagttttaatactcattgatgattcttgtatgaatcaattgtcattagggtgattgccaaatagtgatttttctaactccgttatttcttctacaattgttaattaacattcaactgcaagaaacagatttgtacttttccttatttacttacatcagtatgtatttgctgattcttattcaatgaattataatcttttactatcatttattttgatgctcaacttgccccagatttggccagtgggaagccccttctagttggttcctgtgtcttactgacatgacctcatcattctttgaagaataattactttttagcacagaaaatatcatgccaaatatttcaaaatgaatatggagatttatatgattatgttttaccagttcttctctttgtatttggaaaggtaacagtgagtaatggcgtggatgggtagtataaaaagtctgcagggtttatcctataattctgacctaccttagttggaaatgggaatttttttcagctactaatatatcagaattaattgttgtgttgctttaggattgtgatgttatgaagaggcaaagtcagtccattgtacaaggatgggaaaagccttttaattactgtcccttttctggttgaggctatattccctcttctggcttcacctgatgacaagggaaggcttctcgttcctcagaaatttagatagattaatttagactgttaattttactatctggaccacccgagtaacctttccatgatatctgtgaattctgcactggacttcactgtggttcccccagttactgtttttctttatctgcaaaagttagcaagattaagaccccaagctgaagcaaggcacatctttgcttcctgctgactttcatgagctgttgaatcaccttgtgtcagccaggcaggagacagatggcatgctgaaatgaggcatatagaagaatttcatgaaggggacatttacaaaagtgtcagcaatgttaggagaaagctacaaggaatacaaaagcactctcaatgcagcagcagacctgaaggagcaaggggaggagtgattacctgaccccagagaaagtagcttcagttgtatgaggggcagtctgattggagtatgacttttcggggaggaatgagtccagtgccaacccagcaaagaaggaattggagaagaaatattcctatgtcaatcttctctctctggtgctttcccactggtgcttctcattggccaaaccaattgggagctcaaaggtaggagagcccatttttgcaatgtgtagaagtcacccttctgggacacacagaatgatgcagaagcagagagagtggctctggaggagcaaacacagtatcctacacacatggcaattctaaatttttaaatgatgatttaagggtttcttttcatagctcaaggggtcatccaccatcactctggcttccatacttctcttcctcctagaatcactagctatcctctgacaccagttcttcctcctaacagagaacacacctgctgcttgtaattctgggaggtcattaccccctacctccagtgacatatctaccctaggttttgttgtcaacgtgggtatgcctctgtgtgtgtgtgtgtgtgtgtgtgtgtgtgtgtgtgtgtgcgcgcgcgctccccttctcccccaatttgtaatgtaaaaaatctccatatcattagaatattctgttaacaaaaagtgactgggcaaacaataaaataaaaaatgtaatctttattagttttgcacattttaaatgttggttagcattatttagcataatagtagcattttccagcatgcagttcacgaatacagtttatctaagtagttttaaggaaaagaggagcctatggtttgcttctgtaagaaacacaaaatgtcctgatgtaattgactatataagttgactactctgtttttgtggaaaaaaaaattatgaagcccacattctatttagaacaatctagagcagcattactccaaagaaatgaaaacataaaccgaagtcagaaaaaaagaacaaaaataacataagcactaccttcaattcagttagtgcaggtactaccagaaatataaataaaattttaaacccttttccaattgcaaagcataatttggatatgaatcgtgaacctattttgctccttaaaattgtgaaataatctaaaattagcaaatgtaatttaaaaagcagaaatctacaactacccagtcttgttttcatgtcttatttagcaaatttctttcatgaaaaagtactatggacagaaagtaagaaaagtgattgtgatatcaacctgaagataatttcctcttcatatttatgtacataatgctgaaaaataaaataaagtgactttttacagtatttatatttgcttataaaattctaaacacatatttaataggttaagcagtgtgtttttttaaacatgtctgtacagtctggctatataccatatgttatccacttaaaatgtaaaaataaccaaaaagctgttaaagtgctgcaaactattgcttaatgacttaaataaatgagatctgttgaacaatttccttgactttaccactgacatatggtttctcataaatgagattctgagcagtgagagaaaccagatacagcagcatggtaatataaacatgcattgatagcatccaaactatctataaatggtacagaatacattttattacctgtgtaaagcttgcactctacatttcttgtggtacatatttgatgcaataaatactgtgcttaggtcattatttgtttgctcaaacgtgcaccacagggtaaaatgactatttacataataaatagcatttcattaacatatacagtgtcaaccttgctgagagccgaagatggctaaacaaagtgcaggaaaaagcagaaatttataaagagtaattttggtcaattcagtcttctggcggtggagggtgaggggcaatattcactattcaggttttttttttaatacaacaaaaagaaacataacatttatgactccaaacatttgaatgaagtttgcacctgctaagatttactggcctacccacaaataatctacttggtctaggggctggatttcgcaaaacaagatcaacaaagcacctccacttatcacccaattacccctcccagaaatatggtgaaatttaagaatttgtttttcttgtgactttttctcatgcatgatctctaagtgcagcatgccctcatgcaaaccacgactttgtgtagctgggagggccatgtggttgccataccccccaggtggcatacctgttatagaggtccttagcctatttctcaacagaaacttcgtttacaaaaatagtcacatataataaacacatggattaacaaaaagatgaatccactaacagattccataaaaatgtgacaaatgtggcagttgaaatgcaaacagtggatacaattactacactaaagtgtttcatgttaaacaaccccaaaatcacaggtttgcaccccttgaaactggtccctacagtctgactagccattgtgcatcttatcttcagcagtgtcagctggtagtgagaacagtaacctcctgtcaaggtcatctcccctttacacagagtcacagtttgctgacaaggggtcactgtcttattgtaggcactgaccttaaggagatttgtgtaaaaacagtcagtttggcattgacctcctaaaggagtcctgttgataaaaatacatcaccttcacaggctgtaaacaatttgtcacccaattatttttatttattttcatttatttccctttggctttttcatctttgccttcttgctcatgtttttccacaattggctttgtcacccggtcataggaaggtggacaagctgcagtggacatggtcagatcagttttttctgtaatagagttttcatttattctgtcaattatcatgtcttcttttataagaagattagccccacctttgattttgtttttattgtacgtaaaggaagcttgttttacagttcgctttaaaaggtggcgtctgtaagcacgctgaataatgacagcagatacttcctcttgttttcgttttaaagtagtagtgattggctgataggagaccttggaaggattggaagccatgaatcgctcttccatctgtattcgtagagcatccatctctccactctctcctagaacccgctttgtaaaagcaaataagatatcaagacagtggatccggtcaccactcaccatgggcaaatccatggcaatgagctggagtttgtttggttgtggcagattgagaggcggttcaagcgcagctgcaaactgagataatttttcaaattccatgaactgagttgcatcgggatcaaacttctcccaaacctcatagaacatctcaaagtcatcctcactcagaggctctgcactttcttcagtagcaacactgaagttctccaggatgaccgcgatgtacatgttcaccacaaccaggaaggatatgatgatgtaactgacaaaaaagaaaattccaacagatgggttcccacagtctcccttaactgagcttccagggttaactttattagggtcacagtcgggtggcttactgttgagaatgggtgctagcaatccatcccagccagcagaggttgtaatttggaataggcagatcatgctgttgccaaaggtctcaaagttgaacatgtcatcgatcccaacttccctcttaacataggcaaagttggacatcccaaagatggcgtagatgaacatgactaggaagagtaggaggccgatgttaaacaacgcaggaagggacatcatcaaagcaaagagcagcgtgcggatcccctttgctcctttgatcagacgtaggattcggccaatcctagcaagacggatcactcggaacagggtaggggacacgaaatacttttctatcagctcggcaagaaacatacctatgaataaacaatgagaataccaaccagtgaagaaatcatgcgttaaaataaacatatgtttcttctaaagctccaaggtaaggttcagagtcctgaacccagttatattaaatatgacaactatatataatatatatataattgtacataatatattataaatcttaattttgaaattcagcaataatttcaattataaggattatagtacttttttttatctttaagagatgtttataaactacttttagtttatgtaaagtcccaagtcagaatttaaaaagaaaataagttaaaaatgcacatttggccgaacagtagcagcccaacagtataggtacaagtttatatgtatacagtgactttttctgaaattgccatattctaaattctctatttactccttttccatctgaaagtattggtagcttttgatgctactttcatctccccatgatcttggtacttacttaaattccactctaatatttttatatactcatttatgtatgttctggtgcatttctgaaaggatcccaggttgatgctctttttagtatcctgtacttaatgttgtatttcaattctttttggtctcctgtacctaacactgtaatctcagtcttcttattttcagcttctctctccatttgctttttagataaaaacaatacttgtaaagttaaaaagaagagctcaagaaactaaatgccttcaagtttaaatgcctcattctgaaaagacgaagtgtaagagtgtgtgtgtgtgtgtgtgtgtgtgtgtgtgagagagagagagagagaaggagacgtgtgagaatacaacttttataccttagccacactagttataaccaaggattataattagtgggaatcaaaggctatatacaatgagctggatataaggccagtttcttcagagaggggagtggcatgaaaatctgtccaacacaggtgcctcgttttggatagtaaaatattgacccaatcatatcatcctgtttagggaagaatgaataggcccacagacagatgctttttactttactagagctttagttttgtctaatgaaatgagctattgctcatgaggctagttatgtgttccaggctttgaagtatagtactgatgatgtcccatgccaccttatttcccttgtgcatcattatgataaacccatttttaaggtagtctagaaaatctctacatgacacttgcagagaacctactatatgcatttgctaatgtttagtccttgtctttattctctttttatgcaatacttttccttatcttgaaaccactttccactaatatctatatgctggtgactccatgtctattctctaaagcaattttcgtgagtaccagactacatttctagtcttgttaacagaaccatctagatactatattggttcttcaatctcaacatgtcaaaaacatttttattttagttaatagcacagttctagttcaaatgaatgaggttttactacatttacactaagtatattgttctaaatggatagaataagaaacaatactgacatatagtaggagacattttgttaaaaaaacaaacacacttggataaaatgtatcaaaatatttacagtgattatctctgattgctgggatgatcttgaatctaatcttgattgtttcagctttcacttttatttaactgaatttaagaactttaaatatttcttacctacaatggagagaatgacaaccacaaaatcaaaaatattccatccaatggtaaaataataatggcgtagagagatgagtttcagtacacactctccagtaaatagcacaatgaacaccagattgatgcgtgacaaaatggtagtcacatattcactctggtcatctgtttccaccatcattgtgaccatgttaagacagatgagaatcatgatgcttatgtcaaaaacttgtctggttacgaagtcaaagaccattccttgaaatttgttctgtagagaaatagaaatgcttttaacaacaaaggagttttctcatgtgcattagcattaagtactttctgcattaattgactttctagtttcttgcaaagtagtcattggccctgatttttgtaagaatgatttatagcatattaattgttaaaatttagttatttaaattgccatttactaatgtgtatttctcagaataacaatcccttatccaaagaaggtttctgataaaaacaaacaaacaaacaaacaaacaaacaaaagaaacattcaacactgtatacttcttccagaggtatgcaacacatatcaacattttaagattatgaaaaggtaagaaacccatttaatttttttttcaagactttccaatgatcagctggaccatacatccattttaaaatatagtactattaatatttcacttgttgtattctcaaataattgttaaggagaatttggaatttccaagacacatctataacattatgcatttaaataccacatatggcaatactcatattcttctaccaaatagccttggctaacattgtcagacacagaatcctgaaactgcacaaggataatgagaccagaatgacatttcctatatgtttatgtcaaaaaaaacttcacgttctttgtcgttgatctgtgattctgcttcccatttctgccactgctagtcactgaaggccatctgcaggcttatttctttgggccactgaggaattctgagggaattttccaacttatatttttcctaaattgttgtttcatttctactcttagtgctaaattttaatggagaaagtatatatttctcatcattctcaggaaggcaatattcaatcatcacaatatgaatatttgctagtagttttttccttgatgcaccctaggaattactgaaacctctcagatcatcatcataaaaatatttatagtgtgggataatagctgtacattttcatagcaatttgtttatttcatcatggaagcatgagtattgttatttatcatcataaactgtaattactgaccctgacttctgcagacattagtaatacctaactctatagccatacatatgaatagtagatactggaattctttcctcctttaaaacacttagtatctctagtgaaaaataaaatagaagtaaggtgttatttcactcaacacttcatttcttaaaatattaggaaattgcatttcttacagccccatcccaaggtttacttctttccctgatattacttggcaaccattcttgagttgtgtgattaactttctcttgtgcacatcacattgtctatgtgtccattggccaattaatatggattgtaatggggtgcttctaaatctcttgaagtcaagggtgtatcttctatttcttcttgttcttttttggtctttaattttttttgttgttaccattatcataaaagatacaaacatcacttttagatgatgctctacaagtgaaagaaattttttctactggaaatgttagctactttcttttttgtgagacaagcatgcaagtttttgtttttgtatttttcccccatatcatttgatacttcttactcctggtcgaggtataggcttttgcggttttttcgatcctaattttttcattgcattatagtatttcttctgttcttctgtcataaagatgtcttgacctccaaagtatagaaaagaaaaatcaaactggttaaaactgtgtccttttgtacatttttttcaatgttaaaatagaaaatggatggctaaaaaaagaaatacaaaattcaactgattagtataattatatctgggatttaaaatgtaaaaaaaattgtactctttaggtatgataatatttaattccctaaataattcaaaattgactttattattattatcttatgaagacaaacacccccaaatctcaaaaaggttaagtattttacccaagaccttatgcttagtgagtggcgaaatttggttcactgagataataaatacttggtaccttatactatacatactacctttatgatgttaaaggcaataattttcttatttaaatgtagcaaagagttagaggatgtatactgcaagacagtttggagttactcattaaaaaagtcactctaactctgtcaagaattggaggaaagggataaaaagaaaactggatgagttagtgagagatttaggggataaatcagagctcatagcatagtaagtatgggacagaccagtagggatagaagattggaacactggcaagtaagtgaaatagagtagcctgatattgacttaagaatactactggtaataagaaaagggaattgaggggagaatgttctgtagtctaagaaagcactcattcattatacaaaaagcaaacctactgaacaagtgagatgaagcaacagtacataaaggaagaaatacaaatggccaatgagcatttaagaacatgttcaaatgtaataaaatacataaaagtcataacaattaaggttataaaagtcataaaaattaaaattaaatacagttttcacctattaaatatcaaatattcaaaaacagaatgtttggtgacagtgagggaacggtggcatgggtgttcatacactgatattgggagtttgagtagttatattactctaggggagtaaaatacttcattgtgggaatttattctcaggaaataattaaagccttattttctgtccctctctctttttttttgtacaaaactttcaacaaggtactatttaaatcattaaagattaaaaacaatctaaattatcaacctactggggaatgaataagtaaattatgataatgcatatatgaagacttaacaaaatgagaaaatacttatgttaagtctaaagtggaatttataattatagataaaaagtacaacaataagagtatgtgcagaaatactctgaacagaaaacaaaatgtgaatggcagcagttacttccaagtgatgatatttatttactttccatatgttctataatgtacataggtaattgggacaatcaaatgagccttataaatgataaataatagtcatacaattcaagactgaaacggatagcttgtatttaaatatcttggagaaagaaatgggaatatataaaagaaatcaatgacagaaaaaagcgtaaaaataaacactagaagaagcttacatccagtgcctaatttattgcaaagaattagttggaaaatatattttcaagggggagtgggtagttgtagggataaagtaacaaattgcttttgggaaagaggcatattcggttgctttctagttttattctaattattattttttaaaagatagaaaatgtttcttgataatgaataagaggaggaaaaactttatgaacctatgaacaagagtgtggaacacagttattcttagctttctatagccggaaatatatggatagtgaatgacagaggaagaggaaggaaaaatcagttataatatatactcccattttgtttctaaattcaagtactcatttggcagagaaaacactccaaggaataattttctatctcagtgggagagaaaatattagaaatacttatcttctttttctgctggttgaaattatctatgatgacaccaataaacaggttcaaggtgaagaaggacccaaagatgatgaaaataacaaagtaaagatacatgtacagactttcttcatacttaggctggagttccacctaccaaaggggaatattttgtaaaatattaccatacattttagtgctggaaatgtcactggtgctttttcataacaatagaaaaaattattcttactaatatgtcagcattttttttttttctgaatcaactacctctaaaaaacatccctgaaattggcctttagggatgttttcatgtgaaaaatatggctattatgacattctaaaatctatttttataactataaatacaaataatattcttccatttgaacagtaatgtgctaaatttgcaagcttttaaggtactgaattttagtaattttaaaattattaataaaaaatttaaaactgtaaatatctacaggctaggtttagaaacagtcattcatgtatgcatgaaataatgtagcaaataagaaatgagttgttcattcagatgtttggcactttaccctaaagtaacagttattgaatttttcagattaagtagacatagatggacagtccattttataaatcctcagttgattatttaattcctagattgtgcttaaaacaaatgggctattacttataatttagtaatggactgaaaggtcactatagttttttaacagattcatgtccttctaaaagcaacaaagttaaaaaccaactaaacacacaaaacaaaatataagtgacaaagtgaaataaaacaactctggaggttatcaaaatgatattcaacataaaactaaagctatttgaaatgcacttcaagaaagataacatcaaactctatcaggttgaagactgcagggacagaggttattctttatgatgataaactaaacagatgggacttgagaatagaaagatgaaggttgatagaaaatactacatcttacaaagttttgaagagcaaagttggaatgagcatgaatttcagtttaggtcttggagcctgaaagaggctgaaatcaaataaaataggtttatattttggtgatatacacttaaaggaatctgttggtcacagaagtgattgcaacattagtaaaggctccagtcaatttatgaatgcaaaaatcatataaaaacattcttttatatggtttaaaataggattatttgaaagaaatcatcacagtaatctaaggctgacagaacaatatccataacttttcatgctgtctaatatggagggtgactatacatttcaactaatgatagaaatcatatatttcttcaaatttggtcccgcacactaaaattactactaattatataatgtgtggataaataggaaacaaaatagaaaatatttaaaaggaaaatatttgttagttactaaatacatgaatttgttactttggttttcaaaataattcatgtgttgaattatcttagtaagatctttctgataaacattgctatgcttgaatatttacctgtcacactttttcccaaatattttaaatcaagatagaatcatttcatttggtcgtttatgctttattcgattaattttaccacctgatcaatattgtaaaaagacttagaatacaaggaatacttacatttctggaatcaactgctgcatacattatatccatccatcctttgaatgtggcctattaagaaggacatgcatgttttactttggagtaaaaataatttagacctgatgtttaataaatattcttactgatataattttcaaaagggaatatttttgaaagacatttcaaaacaaattttacacagattttggaccaagacagtattttagtatggcttttcatttctagaacacatattgaacaaaatggccatttgatatatcctccccttgataaccaactcacaagcacttttcaattctttagagttcatggtgtcatgatatttaaagcagtattaaaatttgctggagcactttttagaaagtcttacaaatgccaacacatgggtcaatagctctatcagccaaataattacaacttagatctaaggatcatctgctaaaatttatctgcagggtgatcaaagtgattgaaaatttaagatttctctttattgtaacaatgtaaggatagtaccaggatacataaaggcagggttgcaactatccttttaagaattttggagcaaaacatttagaaatacaatccttttaagaattttgcatcaaaacatttagaaataaccccctattctattttctttctgaaattcttgaagataataagttaatatgaataagaaatgtgaacaatagtacagcagacacttggcactcacaggatgaaggatactcaggctaacaacttacagtaatttgttacttgtcctggggcatgaattttgagtcctgtgggcctaaaaggattatcccttagctagtgagggaggttagcaaagcctttagcgtctgtatcacaatatatctttgttctgataacgctaacccttgtgaggtggtggatttcatgagacaaaagctaagcaagggtgtgggtgacagcagtgaaaagaaagtaatgattcctagctagaaagtacaaggcttttgtatatgaaagagagagagatgtgttaaatatgtcagtggcttaggtcaatgatagaacaattccattacacacttggtatagaaacaaaaaagtgattcaagggaccatttcaatgacttactaatcaatagagaggtgattctataaaagccaaatgtgaagcagtattttagagggttttttttttttttggtggcagaatttatttaatagctttgtgcaggaccatcactgtattttcagaattgcttacattttaaaggattgcttaaaatttttaatttttctttcctcaaatttatggaggaggtggttgctttagtgatatttacaagtatggtcattagttaagggttagaataagtgcccaaataaatatcatcatgtgtcgacaatttttaaagaaagcattcttgctagattttttttaacttttgtttttatttgtctttagagacaaggtctcactatgttgcctccactggtctagatctcctggcctcaagcaatcctccagctttggcctcccaaagagctaggattacaggcatgagccaccatgccccacccgttcttaccagatttaaaaaatctctattttaattgcatgaatattattcagagtagatcaaaaatgttaagaagagaaataagaatttccaacaaaaaggtgggaagaatttgtaaagtaatcatagttgacacctctggaagagctgcaaaagggttttgaccagtgttggtttgtttgcttagttagtcttctggttgaacagttgaaatcataaccttggtgagcaaaaattgatttctgccctaaagacactgtagaaccacaagggaagaaagaaattgtacagtcttttttttttaagctgagttttcaaataatctggactcttattttattccctgctttgttgtggtgctgctgcagctagaagcagaatcaaatgaaaatgtttaaagggctaccttttttaaatataaattataaactatttttcttggagacccagtcttagagacccagtagtgaaaacattaatatttaggacaaaatagacttaaataatggtgctgaaaggtcatttgagataagacaacagctgcttttgcttcatttttgtttctagttgcttccaggtataattctctctctttttttttttttttttttttttttttagatggagtttcactctttgttgcccaggctggagtgcagtggcacccaccgctatgcctggttctaattctaaaacctaaatgtcattccccaaactttgatccaaataatagaactcagcagcagttaatccctaccaattaattacaatccaattaggtgtattaagtgtatgtgttttggaagatgatctatctgttaagtgtattccgttttggtagctgatcagggaaacaagccttctaatcacaataaaaaatggcaaagttactgatttattaatttacttgtttatatagaaagagcaatatagaaacaaagaaaatacaagaaaaaagacaaagaggtctttgtttggtctggtcactactgactatatctgcagtccttacatgtaataaagttttcacccatctgggctcataaacttgtactaacaaattgaaattttttaaatagaaagaaatatatactttttcttaggaactaaataatagatgtatgtcattattttgttattattccaaacaataaaaatattcagagaaaatagtgttcacttacaacttgaagcaaagagagatacccaaatcctacattatcaaagtttactttcacatttttccatcgagcagtctcatttctttctattagttttaggcaatcagtatgattattcacgtcttcgatgtcaaacctgtcaccagttgtggtgttaatacagtggtagaatttgccagcaaacaaatttacgcccatgatgctgaaaattagccagaatataagacaaaccagaagcacattcatgatggatggaattgctcctaaaagggcattcacaaccacctaatacacaaatggaaaaaaagaaaagtcagaattcttatctgttaataaagaaaaaaaattcccctagtaatctctggtctttccattctttttttctatcaatgctatttattctaggatatgtaaaagcaaggttcaaaaaaatcttaaaattcatttttttttcttaagcaatacacttaggaaaacaactataggcaatataaccaagaaatgaaacaaaaatgtttttaaaaaaaagggagggagaagcattaaaaggttaaaggaaaaggaaaatcagaggaacttgctgccagatgaagtcagaattgtgttatcagaataaagaaaagttaaaaagcctatacagaagtttaactcattttaaaaaggcaatatattaaagaacaaaactaaaacatttggacctgagttgatttgaccaatatatttttaaaataacttaaaaattcagatgataaatataaaaaatattattaaatacctaatataattgtctttaattattcatgcattgctatgactaataatttttgcataagaagcaagacaatttgcattatgtatttcattagatcatcacatcgtttatttcaagctccagtcatgtcagttgtttcatttactgagtttaattcaaaaaacttatttcaaatgaaacataatagaaatcatttcttaggaaaataagaaaaagagggatgccatacatagttctcaaatctgatgtgatcacatgaagttctgtgttcaattattatctacttttttttttttctatagaaggatgttttccccctctttacttctggaccactagttaaaaatcttgagtgttcatgtttggaaacaacatagggatggcttccttgctttttcctccatacctcccactggagctgcacaggagtggctaagagggaagctaaaaacagaccctaaaatgcttataaggggcagctgcctcaaacttggacattaatagctaagtttaattccacctatgtgcttgtattattcttgtcagtctgatccaatggaagtagtcgtcaaaacatcttctatttgccatttgatgccagtgtatttttagaacaattttttttaactgcctgtctgaaaaaaaaatacatgagccaatttcttatacttctgatccctgtttaaagcctgtaaagaactctaggccttctggggaacataaaacagtgtgataagtgggccaaagaaaataagaataccagtaatgacaaaggtggaggggatgagtatgaaaaattaatttggttgagttatccaggcagaaccaaatgatgtggccgatgcaactaccaagctgacacgtgacactttgccttatctcatctgactgtctgcattaatacaatggacttcataaattctcgttatataatttattttaaatggatgaatagaattagatttctttcagattagagatttggaaattgaaatcaagttactatttcccttcttttctgaatattttgtccactatccagattacaatgctgtttctagtgtgtatacacagagtactaattaaaatacgtattttgccttcaacacccaatttagagtatgagcagaacactgattatctatacctatttctcgattttcttttcacattacctgtctcacattttttctttgaaacgtttctcagctttgccacctcttttccattctcacagtcaccacctagaactgccctctgttatttcatacttgcactgtcatctgtctcctaaccttctccttcatttaatctatgtaagatgaattaatcttccccaagtcccacttgaaagttatttattggctctctggtaactaacaaatatttttcttaccttggtattcacatcactccacaatctatatttccagttttaacttccctggtcatctatacttcatgccacttcaattaatataataaccgtgtgctaatataattgccaggtgattgagatgccatttacattgaaattccttgtctaatagctcctcttctgaaatactctcccctcttaaaggctttagttcaaatagcacttctttcatggagcctaactttgtcccccagtttagcctccaaaataaagaggaatgttttcccctttgaattcaagaatcagaattctagtactgaacagaactgtacagataattcagtattgcgttctcatttggcatatgagaaaaatgaggttaaaacaagttaagttcagaaagtagcctataaatagcatttagtgctgtttccagtctacgtggaagagttgctcccacttatctggtacccatattactctgtactagagttcagtgtaatcctgacagattgtaagattttctaaaaatttaagatgcaaacatatgttcgtgaatcttccagggccttgagtgtcttgaatataagaacataccagagagctttgaatataggaataaaataatggttgacaaaaatgaatgggttaatgaagcaaagtttagattagtatttattgatcaaagcataatttttaaatgttatttctgaatatgggatgagaataattaaggaactgagcacagggagaagtttgtgcttaggtaatatgtttgagaggtttactttgaaactggggattgatttagagttaaagcgaactctatggaatttatgacgcaagcatgtactctgcagcagtgcacttcaggatatgatttgcaaagttggcatacatttggcccagagaaaagttttattttttttgtgaacataaaataactttatcttagaaaacatctggcacagtattggggagtttattatacaaagctatagtcatatttatgatgtattaaattagacaatgaaagatcatagaaaagattgtcttttcccaagagttccaagccattccttggttcagcaaagaaggaggtgtattaacttttttcagtctcaataaagctgcagtaattggttcttatggggggaagaaagtaggcagaattagtctgaataaattggaaagaacaaatttcaaattgaactttcaggctacatgaaaggaaatgtctgagaaaggagctatcttaatgaattaatactgtactagaggttgtttcttctcagaagcttttttttcaaaacaatcatcaaataaagtttctctactctagcacaaccaattctatttctggttcattacctgcatttttaaaaataagtctacactaaatgaaggattgataattaaatatgcaaattcacattagaaattttcatacatgcagaaatgtctttttatctgaattaattactttgaacttcaaatcaacactattcatgaattctagtgcttctctaatagaaataaagaaaatctatgtgaataaaaataaaagtgggcaaagtaggaatcatccatttttaagtataaagaagaataatagaatctttcttaaaaatctaaaaaaattatgttgtgggttttaattaagacagtttttttgtaagctatgatatattggtgatccaaacaaaaattctgactttttctgtctctcgaatataaactcttcttcttgtataatacacttaaactttaagaataaataaaatgtagagttatgtttatgtatgttttcactgtgttatgttttaaaatcctagaaagttagttgggagttacttattctaagaagtgagtttatgccttaaattttatcttaatactcatgataagacgtttttgttttatttctaggtatgtattctattctgcataattcaaataagtggatttttttattctaactttttgtttacaacacaattcacatgtgcttattcaactatttcttaatatatttttgccttgttaacattttgaaaataaccccatatgaacttacacaataaaaaatgagagtggtcacaatcaataccagtcttatgaaacctgaaatattgcaccctagtatctgctcatacatatcaataatcaactgatggtatctaactggtaattttcaggacccagaccaatgtactaaacagcaggggctgtatgcctcaaacagtatcatgagcttaacaagttaaattgttttttcacataatcattctacaccagggtcccccgccctcaccaatccagtaatctccccaaagatggataactccatatacacataactaaatcatattcaatgaaacttaataaagatatcaaccattggggttaaaatccacagagggtaaattcataaaggtttttttttttttcaaatgaaatttaagacaattgaaaagaggggattaggatgtaaataatgtattttccctactgtggtgcaataatagtacccttcccaatccctccctcaccccactacacataagtcacagtgcaaggattaaaggtagcaaaaggggtaatacagtacccataataaagggctcaggggaggaaccagcgctccaccccatccaagttggagcaagattatcctatacaaaatagaaatatatagtttgttattagttagaaatctgatatgacagaacatttggtgttactttttgttcatgatgctctccgtctgtttccctatccattaagacttgagttcttttgaaaaagaaggtatttaagatttcctaggttaggaaattaaaaatacaaatttaaacacaaattttattttaccctagatattcacgacatcaattcactcagtttaattttacaagttgaaaaatttggactggaaatttgaaatacaataaatgtttaaaagctgtcagccagaaatgtgcataaaacatgcaaaacacaaagtgcaacgtgatgataatttatttgttactttctaacttcttatcaagcactgtacaacatgctttattcagtaatgttgcataaaagcacatgctttgaaaaaataacagaacaacaaaaataaaatgagtgcctgagttacgctttgacgcagctattgtgattttatgctgctagggcaaagaattaaatgagagtttctgagcatgttcaaatctcacttcccaatcataatcatcattcttatatccaacctcaccatcattcatgattatatttttacaaaataaaatatccaaacactagaagtataaaaaatagaatcaattataacgttattttgactctacaatgccaaacacgtattgaagagattagtcattttagtgctgtgtgtatgttgtcattatgaggaatagagccatattcataaatctgaccatttaaactattagttatatcactatcagcatttataaggattttatgtctaaaactccaagtttcaaaaactaacctcttttaatataaaaggcattattgattaataattatagatatggttatttctgagaaaattaaaagtataccgataagatcagcttttttatagaaatgaagtgtaatgtatggaaatatctgagcacttgaccaatgaatttaataaactttcaaatggtcaaatgtaaaaggtttataatattttcaaatgtttagcattgttcagatttcacaagccatataaaatatattattttgattcaggcaacatgttttcaagtagaatgtacacaaatgacattttttttctccagaactgaaactgccagtctgaaacaaaacaaagtgacatttaattggaaaacagacttaattcttatacaccccagagataatttctgttaacattttggtgaaaatttgaggctctctgtgagaaataaaagaggactacttgtattatattgttctgagttgtcgataatgaggacaaagttttcatatatgttagggaaatcgaagacaagtcctacgttcttacaaagtgacatttataataagacttgagaagagaacataaggctataaacaatctacaaagtgcaaatggaagtctacaatacagcttagtttccataaaagtaactacaccttaggaggtgaaagagcagtgtttttctattggaatcacacaattcagtgttttgttttgataatatttttttttaaaaaaaagcagaactaattttttatattatatatctataaactaatgcttcatgccgtaaaaaaaggcatggaaaataagtcaataatggcaaaatttctaatctgttatgcatgatggaaaatgattattgcatctttgaaaaggataaaataacattttgtgtgactctgaccaataagatgcaagttaaggttaatgtataaattacctatagtaatgagtcaaaattatattttctgttcattataagtgttttactttattgttataaaaatgatgtggatttgtatgtaatctttaagttagtattactagttttataaattcagtcaacacttaatatctaaccatctaatcttgaatatattcaaataatgcaaactttggcattatacagacaaaagttttaacaactcctttcatttttttcttaacactcatacttaggcacatgtgtgattcacattattttcaggaaaactcgttaagtacagtatatcatcacaaagaataagtacctgatatagaatttactttagattaccattatatcattacacatagtactttaataatgcatcagcttttttttgtatatagatttgtaaggaaactcccaagatggattaggaaataaagtcatttaaataagcacagcagataaatgatattatatcatttcaagagaggcctatttctcttgcatatcacctagaagtaaatatgcaacagataaaacaataaagtagcaattttgcaagaatttgccattccttttgcatgcatagattttcctttttctaaatttaatttagtttaattttggctatatacaatacttcaggttctttcatttttcttaccctcatcccttcaaatcgagataaggctcttagaggtctcagagctcttagtgtcctgagagatttgatggctccaagttctgagtaacccaaggcatttgctgttaaactgaccaatgaaacctgcacacacaaaaataataacaattaataaacagaatcatcattcaatgtgtagttgctatataatacaacaagtataatttttgcttataattattcagaggataaatgttcagacattttcagtaaacctttaaaaaattaaagaaataatttcagtttgatgtaaaggatgtaatttttaggacattaattaaaagctagttgaaaaaaaatccttaaatgtcatataatttatcaactgaataaatagaaaaaaaaagcaaagtaaaaattagtaaaataaaagaagaaatcaaggtggaaaaaaattcattggctattcttcctttattttattaagttgctgttgaatttaaggcttttcttgtagctagttataaaatacaaaaactgctgttgtactaaaaaaagcaggaagtttctactgtgcatcagtatattcaactaatcataattggtattctcagaaattaatgaactacatcagttttgaaggtgatattttgtcttggtaataccttgcattttcacttgtttatttttacataagtaacttagaaagaaattccattacaaaacttcctcaaaattttttatactaatttatggcttctgccatgatatctggccccaaagggccaatcaatgaatatttaccaaatacacacagcaataaatttacttcatttgtattcatttgtaggtaatatacatgactaaaggaaaaatcttacgtatctaattctctaaataaggaatttactaaaactttgtattcaaggaagattataacttatttggttagaaagatgctagtattggagaattccgcatatactgcacactatttttgtaaacttttcttttttaaaatgtattaattgtatcatatttaatatacttcttacattatttgagatgtgctgtaattagtccttttatagagtgctatactgatcttcattaaagaattaaaacagaacattgaaaataaagatattattgttacaaactacaaaattttctataaaattattttcttaaaatgtttcaaaaatgacactaaaaaactttcatgaaaaagctgatgtgtaataaacataatagaaaaaaaacctcaggaagttttaaagggttaaattacatttagatttaaattatagtgtaaacaattctgaaattgaaacataatgtaacttctaatgcttgaaacctcaatattacaaactttctcccttattgatgtgataaagcaattcttcctttgagatttctctcaattggctcatttcacagtaacattgttaagttttttaaatagcttagttttgcctttgttcagggtcaaggaaatataatgcattcatgattcttagctcaagaaacactttccacaagaaaccctcatagtcttgctgggttagtatctttttggggtaaaactactcaatatgaaatcaggatagttttgctgtagctttctaaagctgaaattttgccaagttgataatagaaaacatgatgcttaactttaacacatcttgaagtcagtcacttgttttcagtaaatgcagtattaatcattggggatacaaattctataaagggctgtttgggcttgccgtaaatctagtttacattctaggaaaactttcactgctgaataaagtagacttctctttccctacactctacataccttacttcctataatgaagtcataatccatataatctactatttaaatctactctttaaaaagtttgagtagatcaaatagaatttttttaaatgactgtagcacccaacagcatcactgtttttattgagtgcctttaatactgtacaagttgggggtcaagagtttggggccaagaaactaactcagtggcacaaaatcaacaagtgatggtcctgggatacaaacttgagtctgtctgactcacaacataaaggatttaagcaacataccttttaagttccctgtttcactactttccctacaaactgctgatgtgttgttttttctttagctttctcagataactagagaactaccatagattccatcccccaatgttattttaaatcagaattaaattagcccttgtcttccagaaatgacactctcattgcatatatgcgtttagtggttattatagtctgtcaacataacatagtggtctgagactcactattgtagaatttgaatataaataagacaagctaccttgaacagagacaaaaatatgaacgatacctacatcaacaattaagaagtccagccaacaccaggcattggtgaaatatgtttgatagccatatgccacccattttagaagcatttccagaatgaaaatgtaagtgaaaaccttgtcagcatattccaacatcgtcttaatcgtctttcgctgatcaatatatatatcttcaaatgcctataaagaaaatgttacacattattagctttcaaaaataattatactccataagctatttaaaaaattaatcatatgcatatgacatttcattggaataggagggcagagaaacagtagttactgttactttttttttttcctcgcaaaggtcttttacttatttaatcaggggaaagactattggtggaagaaaaagaaaagtatgattccaatgaattaatttgacttagtcaggaaatagttcttgatgttgtatcctgatgtggccatcccaacttgaagttatgtattccttttgtttcatttattttgcttccttctattggctttttttttttttttttttttttgctatagaaaggaggttgaagaaataatgaaagcttgtgcttttgtaaagcagaaattgtgattgatcttcgcagtctccaatttgactaaatagttgggttcatctgcttcttttttgttgttgtttgttatttttttaataatttatgtttctcaacagacatacagtgtgacaatgattaaatgaaattacttttcatttagattctaatatatattcttctattatgaacctctcgatgtttcacttctaagtatgcattcctttcaacggtgaaagacttctaaagtagcgtgtagaaaatatttctttcttcagaaaaattacaggtaaatatatgtctgtgttagaattataaaaagttaaacttgtaacacacttgcatttcaatcaggcaaactctgtttctctctctttctttctctttttctatctatggtatttcctttgtgttagtgtttccctaaaatgctatctgtatgttttatttatagttttataaataattttcctataaaaataaattgattctgatgaagtgaacaccttgttataaagataaacccatccttaaatgaatctcttgggcatgctgcccaatatttattgttaccaactttcattatttcttaagtagcacaaaaatagtgagcacacaattggaaaaagacagagaagtggtccctaaggacttactactgtccatcaagagataataataataaataccatttagaaacaaaattcgtcagaactcagagaatatatattcccatcccagggcttccaataactttttttaattaaacaatgagtaattgaatattcacatcctttggtgttaatgaataagctgaagggctacactttctgggctatttaatagtaagcaaaaattaatgattagcttcttaaaattatatttacatacatagtaaaagttaatccagaaatatagagttatagagtaaatctatagaagatacaaggtgggataattaaaaatgcattggatactaagacaatgaaacaaaggattaataagtcatcagtattagagtgttctaaaaattagtgctgtatcaccttttcttaatctcactcaccagagcaccactactaaggagaatcatgaaaacaatgaaggtctcaaaccagttatgttcaactattcggaaacacgtccttctcaggttccaccattgttttcctctgccttcttccacattgatttgacaacacttgaatctttgtacacagcctgcagaaagtgttgaaataaaagtagataaagtgtctctgcttccataatatcctttagcaatgtccttgtcttgtctttttattactatgctcatctctgtcttgctagcatagctctctaagcctagagtagtaagagcacattcatcagctgtgtgaagttgtggaaacattcagccactttaaatgatgccctagcggacagtatttgctttgtctgcctcacagtgttattgtccaagagaaactttgtaaattacaaataaatgtgaggtagcttttccttgtaccatatcatcctgttgcactctgttgaagtcactccagaaaagaactttaaattggacattaataatgttaagcagaaaacttcccttttataaaggatatagagtaaaaatgtagatctcttccaacaatgctgcatttgttaccatttaggattttttgtgatgtgcctagaagggcttatgtaatttgcataattaatttagttcactaaaagctaatttgtatgatttggctttgacttttcattgccttcctcacacattgctttcacttagtctaaatgcaatcaacaggtacttctgagtaccattgtaagcacaaaggcacttaggtacacacacaaaaaggcaccgaacatgtaccttactcccaagaaccttaccaaaaaaaatctggttttcaaaaaaaaaaaaaagaaaaagatataaatacaggatccctgctccaaggcaaaaaaaaaaaaaaggaggaaaagatatgtttgaagaaaaaggagaaagggaatgaatggagaaaaggaggaagaaaagaagggaaggaggaaagaaggaactaaggagtgaaggaatggaggaaaagaagagaaaaaagatagaaaagtaacatgtaactgttcaaaaagagaaagagttttcataggataatgtatattatcgggtaaattaaatggaaatacttcttacagccattcagaggaacaagctgctgttccaccatggtcagatgagggcagttttgaaaaggacattaagtgatatgcatgatttgtatagggaatagaagaagactgaaggtatactaggcctatgaaaaaataacatcaaatagaaagtatgcatatttccaaacctcaaattcccagggatatcagaccacaggaaatattagttgtaggaaaaacatatctcttctatctattgcccatactgcaccaggctcaactagtgactgtttaggtatagagtttctagggcagtatttattccccatttcatccaacaattattggaaactgatgttttcattaaagaaacacaatttagcactagcaatccgtttagttttagcagtcagaaagttacttttaaggcaaattctgtgtaggatcattttcagtagtgtctaagatgccaacttattgtgaaatcactacttactttaaaaatataagttagaagttttgatggtactaaaatatttttcctccatgttcttaatctcttccacatattgggcagatataatcaaagcatgacactagactttaagtttttttgtctgtcaacatattagaggtgattgaattatatctattacaaagtgccattttattatatgtgatttattttagctgaccaacagctaaacaagctgcactccaaatgaaagattaacattaggattcttttctttaccttcagtgaaacaagcttctggttcaagagtttcttcaggttccactacgggctgttcttctacaggtgcgccgatgtccacagtgctaccttctgatgagctactgctttcattcagtttctgtaagtgagatggacatagaaagtaaagtcctttaattttggtaataagttgcctgccaagaaaggattattactatgaatttgttttttattcttcttgaggtagagatatttttagagaaaaagagagattgaataaggggaagaaataagaaaatcattgtctgtgctaacccttttaccataattcacaatgtaagcttgaaatcagattgctatgttatgaggttacaaaaggccatcagccacatgtactgagcaaaacactgccttgtggattagagaagcaggggacacagggaagagaagagggaggaagagaaagggaaaaggagcaggagagaaagagaaagcttaccttagaagaaaataatgtcgttaggttattctgcagtttaatgtttgactttacatatttctttaacaatgtcttacctgtgtgtacagatactacctgttgttttcacttatgttactaagattcatggttaaggtgttcagagttatttactataaatgtggtcatttggagagaaattgttataaaatatgtcaaaaattacatcaataaacaaccttagagatattaaatagacatcttcaatttctggcaagtattttagagcctgaagtgttgtaaaatgagataaatagtgtgtgggaaaattcagtttcctctgacaaatcatgtttatgttaatgtgccatgtgaagctgaaagaacaaaatctagttaaacaacaacaacaataacaatatccttcatattttgacaatagtgatgggatgcacatttctctttctagagttctcagaagacaaagatggcagagataatagaaaatattaactaacatattaagataggaaaaactcatgacgctctttctgaagaccagcaaactggcttataagtttttggcaagtgtaattaattcattaatttattcaactaatattttttgaacaccaacaatatgctaccagctgagtattcactgataactgaaatatctattgtccttattggagtatcaaatctagtacagtattttctaaacttcaggcttatgtagacccgacaataggcattccagtgcacacagcagcaagccattcaacccgttatcacgatattgtaaatagtaaaaattaaacacaatattaaaattgttaatatgaatttcacatacataggagagtgttgatatttcagtaaaagtttcaccgaaatatttgtatttgcttgaagaaggatagcttatatgtctgggtccatatctagttgccttctttcctttccttttaatttcttaaaatagaaaaacttacctgacagttacagaaaattaggacctataatggcatgtagctctgtcatagctctgtgaattcaggttgaagatgatctttgaaattataaaatatttctcactgaagactaatttcaacattctaacacattaaataggcctgcatactatgctcagaagctgaaaagttgattgttcaacatgatagacagtagtaaatagatcataatctactttcgggttgcatttagctttgactatctttgtgttctgttctagcatttgcactgaatttaaaacatatccaggaataagtcattggtttcttcctctgacaaacgaagagaatcacctagtggcaggcgttagtcacattctcaatcaaactactcataacatcacatgatcttctgaagaaattcttatgtcttatcctcaacattacacagattcatcatttggccgtaaagtgataggctaagacttgtcacttcaacaagtgccttcatattttaaaaatgaccttgattggcactatccgggacataatgaaattcattacatactttataaaaaccatgtgagcaacatttcatcacccattgttcttcactgtagaaaagcaaatgcccattcttcatgaaacaattagagagtggaatttgagaattttaacaattttcgccaaaattaattaagaactagaaaggatattatttcctgtgaataaatttgtgtggagaggcattcaggtacaaagaattataatagcaaacctaccttctatatatataattgttatctgctaggtctgatccccacatagttttccagtctataccaagactcacaaaataatagaatattagcataaaaatctactcttcatcagtataggttgtcagtaataagcagaacaaaaagttgctcagtaattaatcttcatgtaagtgccacagataaatgattgattctttgcacataagtgttttatccaattgtaaggtgaattagatcctggcatgaacatgtacataaaaattgttcttccttgattactagtaatatcatgcaattgttattgcatgatattaaagtatactgatacactgataataaagtattgccaataactagttttgcttttttgccaaccatatttgttttcttatgaggaatactacttttaatgatacctctgaagcattgatttttattctgcctttaagtgaaaccacttattcactttatgaattaaagcattgttttttactttttctaagacaaagacttatctgacttacctaagttgtgactattttctgtgaaaattacgagaacccaaaagaccttatgttactttttgacacattttcaaaatggcattctctgaagaagacaaatagatcaacagttcaataagttttaatattcagatattcatcttatatttcttatttagacatttatttttaggatgcttacctaagatggtcactcttacagaattactttttaaaaatacatgtagatttatggttcttctgatgttttttcattagagtctcaattcacaaaaaaacctgagttttaagtttatatgatttccattcctattttatccctttgagttactcaaccaagatagtgtaatgatgatgtaacacaatatgagaataacatcaaaatggaaaattgaacaatataagagttggcatgcaattggacatacacgaactctaccctgtctactaaatgttaggaaagtaaaacttactactaattttaagtacatgagcaagcgcttgtaagtacccatattacattggtaactcttgaagaatgtagtggatattaataacataagattgtatgaactgtatgattgtatgaacattacaagataatatgaactctaaattatcttatatttaaaatatgttaaatgtttctgaataactttgctatttcatgaggactactttataaacaaactgggaccatgggtgggctgtagatccaggaattggtgaatagtgttacttctccaaattgtaaaacattaatggcaaagccaaagatagtcacaatggatggatacaatatacttctaagtgtgctttctttttttaatgcatagagcttggagtcactccatatttcagaaattttaaggtgatttaaaagatgatcaaatgcccttattagcattccaatggaatatctgcacttggaaagttcgcaggtctagacaagtgatcttctacatgtttacaaattaattttaaaacattttttaagcaatataagtatattctacagtctgtctgaactactgtaggaaagtggaggtgtgcctaataatactcaaatttagtatgctctcaatctaagtaatgactttttaaacaatcttaaacatacttctttaaccaaattcctgattctgcaatatcactctttcagcacccagactcaaatttttttgtttacttttacttatttcaaacattggcagtaatcaaaagtcagttttccttattttatctctgaaataactattttctcagtcagattccaaattcctatgaaatttctgtttattcttgttaccttttctttgtttaactataaataaaaatggccatcctcattctagcctcatgtgacttagacctttgtggtccacaaagcttagtgtatgtatggtgaatgactaacaaacatttggtgaatgaatgaatagatgaatacctctgtttcagatattagtgatggatgaagtttttgttttcaacttagagttccaaccaaatctcccaaatttgtctttcacagatagaagctgtatgttaatcaaggtgaacttcttttttttttttttttgagacagagtctcgctctgtcgtccacgctggagtgcagtggcgcgatctcggctcactgcaagctccgcctcccaggctcatgccattctcctgcctcagcctcccaagtagctgggactacaggcgcccgccaccatgcccggctaattttttgtatttttagtagagacagggtttcaccatgttagccaggagggtctcgatctcctgatcttgtgatccacccgtctcggcctcccaaagtgctgggattacaggcgtgatccaccacgcccggcccaaggtgaacttcttaatgttctctgactttttctcctagtgatttttcctcccatcattgcggaagagtaataattgctctcttatttaaacccctttcaacactttacagggactactttgggcatatattttattataacttctcttcattctaatggacttacttacaaaattaatgacacttgcagttttctcagtaaaatacaataactgatgaccttgatgtgcaaaaattgctcaggtcgttggctactgcctaggatatctgcacatttctattttcaccagctgaatggtatgcttatcaagaataagttatgtttattttcaaatcaatttacactattctaaaatactgtaagtgtgtaatttaatcttgtagaatttgaaaaatgcatttaaaaagtgttgttgtatttataaaaactaagtcaaaatcattgaataaacgtaacaccggtaaatcccccacatagatacatgtacattaaaaaaccataaaattaggtgtgaatatttactttttaaatagttacaaatataaatttctgagaagatactaaattcaggttgctttatatgattcgttaagatatttgtcctctgggggaaaaaaaaaactaaacagaaataatagatgatgaattacaagtgcagctcatgctaaaacattgatgtagcactccaaacaatgaacccatgctggaacaaggcacctaaagtgacatttttatacatgtcatttttattttgtaaataaatggagcagttgaatgtttgggatccagagaagtgtatacatctttcaggaacaatatatgattaaaaattagatttaaaaaatggtattcatatttggcttaagctctacttcgcaagtcagcattttgcaaagggaggctggtaagccacatcatggctaacccttatgatagaccctgattctcataatagtaagaagaattttcccctactttcaaatcataataacatcagaaaaagtgacatgtgactattagaaagattaaaccataagcagtggggcttatgtcaatgaattactctagataaactatgataacctgagagaagtgttagtgctttttctagaaatttatatataatgtaaataaatgagcattagtgtaagaaaggaaagaaaaacaaacaaaataaaataagttcacaagtgaccgaactaaactgtttttagccaaaacatggggaacaacaagagttttgattggcatgttaaataaggaatacaatacagaaattaaaattaaattaaacaaatagtaaaccttttacatagtcaatagattaaaataaataaaaacattaatataaaagtcacccagaccttctcaaagatgatagtaagtttataaaaacaagaaaggcattaagcttaaacacataatttgtataaattatttctaaaatgctatatgcttagtctttaatgtactttagaacttagagaaagtctatcatctgcagatcataagttgtacagctaaatttcaatcaacaattataccaacattcagtatgtatgttgcaatgaaaggcatctgtcctactaatatgacagaagaggtgtttccagccaatgttctccagagatctcactccagccttaagtggctgaaggctttaattcaagcagggaagttccactttcatctaatttatgcatgatacatgaaaaaatttgattaaaatattatttaaaagattggaaaactccctatagtcccagctacttgagaagctgaggcaggagaattgcttgaacttataagtttgggaacaatttcagcattatagctggatcccatttctaaaataaataaatacataaatgaaaatttaaaaaattttgaaaatgtattggaaaaccataattgaatcaaaatttggggaaatgcatgcccaaatttaagaagatgatgttaaatgaaagaaaaaatatgtgtggtgaatataggggaaattatgtggaatttagtatcatgaatttcagtggaaaaaaggtgataaaatgaaaaaaatcttcaagatttagcaatttcagatgaaacaacttggcactaagctaatgcaaagagctattattttaaaaaggctcttaaagtttagaatttgtcaccaacaccactagtaactaggtggggggcggggtaataccaagtgaagagacagtatctttgtgggtattaaaaaagttatttcaggggtttaatctataaacttgaagaattgacagtatgttgaatgacatgtaagaatctcttctttatgtctgcaaacatgctttcttcatgacagtctgtagtaagcagaattctaagatggtctccaaaatttctggccactgttgtcatgcccttgtataatcccctgcccttatgtatgggcaggacctgtgacttgcttctaaccaatacaatgtggcaaaagtaatgggatgtcactctggtgatcatgtcacaccgaatcattttagaaaagttacaatgttttcttttttcttcaagaaataaataattagtagttctgactttttaatgttaagtaccaacaaccaggcttacagaagcagcaaaatgtgaaagctttgctacgtgaaaacatatactaccaatcaggtaaacttgacaaattatactcaggttttttactagaagctgagaggagttggaattgaacatgacctcagaaaactgcaatattcagattggtaaagtagacctggatagtataattgatttggcaaaaagcacacaataggttaaaaaaaaacaaactaggatgcaaaattctcaactttaaagctctttttaaattcaacatggtgcctctatgaatattttatagctatacctcattacaataagtatgcatattggtcattttatttgcatatatgcagaatatgtgtatacattatcatgtggtaaaatgatccatatatggagtaagtagatgatgtaaattactttatacagccaaaccacatctgtcactcaccatttctgaattgactattccaagaacttttaaaacaagttatggcctccagtggagccaacaaccttattttttcacccttctcctggcccaggccacagtagtggaaagaaagccaccaacaataaactggaaagaaacccagacctggtttgacctcttactttctgcgtggctttgctcaaataattcttcctttagcccattttttaaatatgtaaaatgaagagatgatctttaaagttccagctttaattttctatgactttgtagtgtttgagaatttgaaatgatacatttggacagtcttaaatccaagagagatatgaagtgaggactgatgagaaggtgatgagggagcagatctggactcaggaggagaaaaggatgaggaagttcagagtgggtatggctgctgggcctgcacagtctgggtaacatgttgggactgtggctaaaaaagtcctgtgatcagtctggtcaacatagtgagatcctgctgtccctactaaaaaaaagaaaaaaaaatgatgtttttttttttgatacggagtttcgctcttgttgcccaggctggagtgcaatggcgcaatctcggctcactgtgacctctgcctcccgggctcaagcgattcccctgcctcagcctcccaagtagctgggattacaggcacctgccaccatgcctggctaattatttatatttttagtagagacagggtttcaccatgttggccaggctggtcttgaactcctgacctcaggtgatccacctacctcagcctcccaaagtgctgggattacagtgtgagacaccgcgcctggccaaaaatttttttaaatagctggatgtggtggtgcatgctactttggaggctgaggtgggaggacggcttgagcccaggaggttgaggctgcagtgagctgtggttgcgccactgcactctggcgtggatgaccgagtgaggccctgtctcaaaaaacaaacaaacaaacaaacaaataaataaatgaaaaatcctgtgatcatctctgaccaaggagaagcaaatagctattcccaccttagagacaaagaaaccatccacatgtagctgggcttttaatttcactattagctgtatatgaaatattcaattactcaacatttattgaaagataccatgttctgagatttgtgttaagtatctgtctcatggatctccttcatcagcataatgcattatttacctgggtttttgttttgttttccttttcatgttttgcttttgtttcttcttttttattggccaaattgaaaagcagaaattacactaccattgttttgatattaacttatttgataacaattaggagtaatatttcttaaggtttgtcttccagttatattttttatgacttgtctcttttgactattatttgtttgtttatttgagacaggtctcattctgtcacccaggctggagtgcagtgatgaagtcacagctcactgcagcctctacctcccaggttcaagcaattctgcctcagcctcccaagtaactgggactacaggtgcatgccaccacacccggctaatttttgtattttttgtagagacagcatctgatcctcaggctggtcttgaactccggagctcaagcaattcacccaccttggcctcccaaagtgctgtgactacaggagtgagccacggtgcttggtcttttgcctatttttctattggagtattagtgttcttatttgattgcaattgctctttacacatagaaaatcatttgagttttcctaacaaggattatttgccaaatgtatttgttttctgtgtctgtgtaacaaatgagcatacacccagcatcttaacatacattcaccaactcacagtttctgtaggtcggaagtctggcactgcctagttggattctctgctcagggtctcattgagatgatgtcaaggtgttggctggaaatccagttcttttccagggctcaggatcttcttccaagtttactgtcgttggcagagttcatttctcataattataagactgggcttcctactttcctgccagctcatggcccagaaccactctcagcaactagaggccacccatagtctctggccacatggctgctgtatgcaatttacaatatgggtgtttgcttttttctaggccaggcagagcatatcttttcagcttcctctatgtgatagcaggagaaatcactgtgcatttaaagagtttgcctgattaggtcaggcccacccagcatcatccccctttttgtcataaatgtaatgtaattaaagggtgataccatatccacaggttccaaccacactcatggagtggggattatacaagggcaagtgtcattgagatcatcttagaattctgcctgatacaccaaagtttgtgtgtcttactgatttttttttcctaagaaccataacctgttataccaatattgtctgctacattgataattcactattttttctctttatgtatatcttcttccttttttgttccttttctaatttctcaaagatatttgttaggttctttcatcccttcttaatcatattagtaatattaagtcatattaatgactacttggtcttcttccacaaattttgacataaaatgcttttatttttgaaatagctattttggtattttattatgcttttattcaatatttgtttaggaggcaatttcttaattttcaaatggttggaattctttctatcaatttattattaatttcaggcttaactacattgtgactggataaccctatatgccagctattttaaatttattgagctttactttgaactccagtatatggttacttttatagaaatattccatgaacccttgaaaataaaaattttctgtaaatatgttttttgagataatatacagtcatatttacttttgctattaatattatccaaaatctaaatgttgtcatctattttttaaaatattttaccataggctaaaaaagttgtattaaaaccttcataaccagtatatttgcatcaatatattcttataacggttgagataaaagatgaagtggtccaattctttatttgattgggataataacactattattattaaatactcaaaaagggaaggaaaagctcctcttcagatgtgtaggaaaagtccacctctatgttagcacatgaaatacgaattcatataaaattctaaagaaattcaataacggcaaaactaaaatattctcaaataagtatttttacagatttaaaaatcagtaaggccaattaatttttccttttttgttcttagattgaaatttaatttcattttgaaatttgctattcactaataaagtaatttgttctcactgttttagagattaatggaatatttctctttctttctttcttttttttttttttttttttttgagactgagtcttgctctgtcgctcaggctggagtgcagtggcgtgatctcggctcactgcaagctccgcctcccaggttcatgtcattctcctgtctcagcctcccaagtagctgggactacaggtgcccaccactgcacccggctaattttttgtatttttagtagagatggggtttcaccgtgttagccagggtggtctcgatctcctgacctcgtgattcgcccgcctcggcctcccggaatatttcttaaaatctattttaatgtttattaaaccatgaatcaaccttaaattttaccaatttctaaataggctagtttatttaagaatatgtatattttcacacatgaatcttaatagctaaattatacacttatacactgacttgtatcatccatgtatttttggcaggctgacttaatatgtgagctgacagaatgcagagaccacgttgtatatgaagcatccactttgccttgtacaccagggcattcaataaccacttaataactacaaccctgatggtaagagcagttttcctccgcagtggatttatgcaaatttcttgttttttaacaatgctctttactatagcaaatgattttgaccttgagggtaaggcaaaacaaagcaaggcaaagaaaactttcttcaatattctctgagagtaagtgattaaatgctttttttcttgttctctgacttgatcctacaatgtttatatttttatttttaaacttggtttgttataaggagcttatttatagagtttagtaggagttcaaattataataagtaatataaataaatctggaatttaagggtcaaaagcatacttaatatgtggtcatgcgatgtctatatatttgtatatgtatatatgtgtgtacatatatatttaatatatatatttaacatacacatgtatatatttaacatataaagaatattatccaaagtacttatttttaaagctggacaggtactattttaatgctgggtactttactattgtgacacatatatctcctaagtcatgctaaaatgaggttctctacaacctcagaaatgctagtattaatatttcattgtgtacattgtgcactagtaaatatttctattgtacactatgcatattaaaaattaaaatgacccctattaaagactctcaacaaaggaaaatataatatcaatggaaaagacactgtaatgagactcaacatttccacagggcagctagaaaactcaaatattaactcattaattcccacattattcccagttgatttcttcatcaagctgtatgttgaaaggacaatcttcagtgattattcatatttacagaatgtcagttgtttctattctttagtcaaacacttgcccagtataaaagtgaacgtggaggaatacggctctaatatactactctgaattttgctttcgataggtcacacataaacttctgtatcaataattaaatataagggaacaaaagcaacatatttcagacatattgagtcaatagaaaatcatggtaatacaaaaaaattggaaagaaaacaaaaaaattctgaaaaattgcatttataatccccaagctagaaaccaaaatgcaaatcaaatgagtaattttcattgttaaattcattttgccaaattgagcacagagcttctataatgttattttgacattgatttttaatgttaaattataacatacttaataagtgtctactgggcaaataaactgtatatctatataatgaaagagttgaaagtactactgttcagaggatcagagaaacttgagtttgaatcacaatcactggttttatggactttaaccaattattctgacctccttaggctttaggtttctaatttgtaaaatggttcttacttcacatccttgttataaggactgaacaagataacacatgaataacgtttggcgtatgcttatttgataaatggtaacaatttccatcacagtattgtattgtttgtaataggtgtaattattgatatttgaactttttcactaccaaaaatgtgccaggcatcaaaactaggacttgaaaaataaaatagtgaacataatagacttagtatctgccctcgtcggttcacaatcagatggaggatacagagaagcaattgccacacactctaataggagtagtatagagtatattgagaacaccacctagctcaatctaggaaggacagggtagaataaagtgacatttgggacaagaaggatgtggtgggtgaggatgagtcaggtgaagcaggatagagtaagagagtattcctgtcagagagaaaaggtataacgatgagaactgataaagcatagggaattacattgaatgaaagattagtatagctgggtggggaggtgtgaggtgtactattccatgatactgaaggagtcagcggtggtcagttttgcagggacttgtacccatgttaagtagtatagactccatactgtgagcaatgggcaactcctgaaaggttagggaggacagaacggttacgggatttgcattttagaaagaccacctattgttttgtcaagactacactagcgagaggagacccgtttggaggctgtagcagtaaaactggaagatgatggaggtctgacactgggtaaaggccttgggaatgcagagaggtggacaaagataggtagctttggcagtccctagtgatcaattagaagtagtggagatagtactcttgggttccatggatagtactcttcgcagagagtagttgccatctcttagagactatgtgcttaggttggagattgtcgtatgttccttaacccatataacgtaagataaaagtattagatggaaaaatatcagcaaagcaacaagtagatttaaaatgcatatatatcagtgatataattgggaaaaaatggaaatctagaagtaactgcccatcacctatttattcattcatttaataaatatgttgtatgtgctgtggacttaagggaagacagggttagtgtttttcctgttctcaaagacctcataagctaatgatacatcatagaagttcttcctaatgatttggaagactcttccagcagctttaaactcagaaggggatgctccttaagcacaactatcacactctgggagactaagtgctctctaagtagaattagaccaccacaggtcagtgtgggatgcagaagcagatcagcctaaagtgcaggccagtaccagaggaacaggacctttcaggactaagcaggaggactctgaaacactccagactatgctgttaacctatgcccaatgtgcagtgattggaagttaacaccaaatctatagttgacacctgtacctagttcttcaacaaatagtattatttatttcagaactatgccaaagaaagtacattttcagacactattaagatttagtgtagcggttaagagcgtgactctggagcagactatggagcagactgccaggaccaaccacttactgtttgtgtaactttggcaagttttcctttgttcaaaatatgtttatttttctcatcttaaggctggaataacagtgtgtcttacggcataaagactgaatgggacaatatatgccctccaatagtactttgtccatggtgaacatttaaacaatagctgttattaacataacctgaattactaaggacctcacatttttactcattattctagagctcactcatcgcaaaaacaaatgtatttcttttataattactttagtaatgtgccttttttgttcccaaaaggtacaactttaataactcaatttatttaaaatttttatttaaatggaattaagtagtaattttcttgacatcaccttacacttttgaacatttttaacttccaaatagcttttagatcttcataacatttctataagcatcataggacagatatctcatttaataaattaggaaacggggtaatatagatttagcgatttgctcatagtagagttaaggcttataagctcttaatctagtatccatataaatcaaccaaacctcaaaaaattattgggcaactgttatgcacccagcattgtggtaggtgcttcggaggatagaaatgttataaaatactatccaaaaccaaaataaatttactttctatttggggagataagattttatattgtcttttgcatagtcttggcagttttgcccagccttcaaagctctctcagatctgtccaagtcaccattctttattattaatgttcaataaaaattcatgtttctagcttatcattattcctactatggcatgagtcaagaaattttctgaggttttaaaaaacaattcctcaaattacttgaatgtactttgaaggttgaagtctcttaggacttaaagagaggatgaaatgtgactcatgctattccctttcttcttttggagaccaataggaggaaggtgtagaaaaaacagcccttagtttgctctggaatggaggatagttaggtgtgagttcaccacagatgtaagaggcaaaataaatatgaggttccagttcaccacatctcttcataccagtctattcttgcttcctggaaaccaagactctttacctacatctcatcctcagctcctgtgatttacgcccccggaattccaaactactaattgtctccaaatacatcctcttgcttcctgtctttaggtttctgcatgtttgtatttcctgattggaatgccccttagaaaagtaattttcttaaatattttaaggagcttaccatatcaagaatgtaatcaaaacaatttaaaaataaacagaaaatataaaatgtatcaccatccccagataaacttataaaacaatttattacagagggcaaaaggcaaacaacaaaaaaagacaaatagtggagtatgttaccagtagtaattcttgtaagaaaacttactggaacagtgtggaatgcaactggtaacaataataatgatgatttaccagatattctatattaattaggcactgtgctaagtacttcacatttattatctcatttaatactctgtcccagaaatgcagtcagtaacattatgcacatttttgagatgaggaaactgattattagataggtaaagtcacacagtaagcggctaaaatgaaattatataacccagtatctggctccagagtataaccatttaccaactttataactgtggcctcacatgtctaaaaacaaatatttagtgtatgaagaataaacagtgggcacttgtaattttaacacaaggcattaatataattttggaggtattataatgatgcattgtagataagtcattactggaattcaggaatggaaacaataacatgttcaaatgaaactagtctaatagaggccatgaaaggtaacatttttgcatcagtaacatatgtctcaatatgaaaattcatacttaaaggttgaaagtcatacacacacacacacacacacacacacacacacagagacagagagagaaaatcattccttatagcttattagtatactcctttatctagtctccctggcatatgataactgataaataaatgaaaataggcaaaaagaataaaggctaaaacaaaaagaaccaaaatgatgagattaatatactacaggcagcattcctaatgtagaacaaagactcttcatctattggggcatctgctgtcagcttaattcctctaaaagcagaatatctcataatttatgccttactttgatgaacagaatacagtataagactgatgaagcaatgagggcaaacaatattgtgtgggtttatttctgaccaagaagaaaggaattgtgaagtaaaagtgccaggaaatttgatacaatgtggtaatctgtgaaagaatataaaaagaaagccagattcaaaaatgaataaaagaaattgaaatgtatcattaggggataaatagaagtttcagtatttaattacaaaatttcgtctggatgagatacaactgcatttcaacagcaattcatgtggaaaagatgagagattattactttcttagaagggtggtgtaaagtgacaaggtaacatggctaacaaaaacaaaaacaacaaaatctaactcaagtgaatcttgaatctagagaaaaaattggtccaaaataattggaattaaaatgacaatctcaagtatgctctaatcagagaaagtatttatgagagcccttcagaatggttttattaagaagagttgaatgagctggaaaagtttgatctgagtgtctactttgtaccaaacatgtttaagtaggtcaccacataaaaggagagacatgcatgcatataagtagctaccctaaaatatgatagtactttgtaagacgcatgagtcaagaagatgcattatttattactatactctatgccttatatctctgggaaccaaaaaagaaagcaatctgttctgcctagggttaggaaggcttcattatcactaccttcaaaaagctgaaacagtctttctgaagcttaagaactcctggacttcagacactatgcccatgaaccaagtggttgcattctaattagacaaacaaaacattaaagttcagcacaggtggcaaaagcttcatttaccaggacttctccctctgacatgaaatgtgctctaacgttattctgttctatttcattggccgggtgcagtagctcacacctgtaatcccagcactttgggaggctgaggtgggcggatcactatttcattaaaattaaaaaaaaaaactggcctattaaagggatttctcaagtctaactaaactatgactcacaatttgagaagcaccacattaaattatctctaaagtttctattaccttaacatttaaaatttcaattaatgcaatgttccaagatataaaataccacaaagtagaaagaaacagaactacctctagtgcttcagtggatagttgctttataaaaaggttagtgtttcttttagccttgatcaatataaaaaaacaataagagtaagaatcatgtcaaatttttacagaaaatgtatatcttatggatggtctttgtaaaatagtctttttcctttttaatataacagatagcatatggtagccattagtcctcatcaaatgctaaatgtaggtctaaagattcaagacaaaggaagctagactaggctattactaaatttattttaacagaagttcagaaacaattttataaagacaacaatttttcaaaaaattagccttcatctgattccttaggaaaactcaaataaacaaagtctgaactgacataatatccaaattaaaatttctgtaaaaaagtccacaatatttgataaaaacagtctattttttttttgtcctgaatctatttccatagacatggaaatgtgacaggatctatctactattacatctctgcactatatttctttcccttctctcatcaaacaaatctgaattaactaagcagctctaatgctagggtcagggcagctgcttccagctccaatattagccccctactcctaaaagtggaggctgacctagattattcagagactcattataaatacttgaagcatcttttaagggatatagtcactaaatcaaaagaatgtcacatacctgtggtatcttccatggacaactatcaaaatgcaatggacatgatgatatctaatagaattgtatctctaataaaatgtctttaatgtattcaatcctttaaaatatttagactatacagcctaaaagatgggcaccctgctgtttttgagatttccaaacactaaatgggaagtaaaggtgctttgtcctagactccttgttaattatcttatatatccattagacttttaacttaatatttcaaagtaggttgctatggattaaagttttgtctccacaaaattcatatgctgaagctctaaccttcaatatgactgtatttggggatagggcctgtaaggtggtgataaaggttaaatgaggtcatacaggttggactttattctgatagggctggtgcacttataagaagaagaatagacaccagagttctctctctttccatgtacatgcattgaggacaggccatgtgaggacgcagcaaggaggtggctgtctgcaacccaaggagtgagccctcactagacattgatgctgctggtatcttgatcttggactttccagtttctggactatgagaaaataaattttggttgtttaagccacccagttatggtatagtgttatggcagtccaaacaggctaatgcatagggcagtgtaattttagttgaaggagctacaagaatatttcttgttgttaagttctcttcaatgtacatgagccaatgtgatgcaaaaaacaataaacagaacttgtaaacaagggctctaagttcaactctcggcactcccctcactagctatgtgacctaatgctccctaagctaattttcttatctgaaaagttaacataataacacatttctttccaggttattgtaaggattaaatctgatgatgtttgtctatttgttagatcgttcattcattcatctaacaaatatccattactaaggatgagaaaactcacacgtatactatattaccctttaatttatcagtcatttccgagttaaatcttttgttcctcagtgaaataaaattttacatgatgtcaaaaaaatctatatggaaaatatataataataaatacaggcaatataatgcatgtattgtaaatgttcctcaatttacaatgaggttagttcctgataaactcattgtgagttgaaaatattgtacatcaaaacttacttaatacacctaactaccaaactttatagcttaccctagtctactttaaacatgctcaggaaatgtagattagcctacagttgggcaaaatcatctaaaggaaagcatgatttataataaactgttggataactcaggtaatttcctgaatacagtacactgtacggtaaatattggttgtttatccttgtaatcacgtggttgactgggagctgcagcttgctgcccctgcccagcatgagagtatattgtaccacaaattgctagcctgggaaaagatcaaaattcaaaatttagagcatggtttctagtgaatggctattgcttttgtattatcataaagtaaaaaaaaaaaaaaatcttaagtcaaaacatcattaagctgaggatcatctgtatgtgtgtatatgtatatatgtatatgtattcataccttcccacacctatagaatcttacctctttgctttcttccagatccgattcactactaaagtcttccgtgtttaaattttcaaagtcagattctcctacagcaattggtacagtcacagtaagactggggttgtttatgaatgacatgtaatcactttcatcaataatgtatttttcaacactgctgccagttcctataccacttgtagttccatttacatctttaagatagtcaagatctttcccaatttctgctgtatgattggacatacaactgtctttcttgttgtttagatcatcaagtggtttaatttcatctaaaatcttttgtttcctaatgaaggactgttgaataaattcatatatttttcttttcacataagctactcctttgtgcatcctatccacagcaatttggagattattcatttcattatcatcatcagtggctgcaaggttgtctgcactaaatgagctcagaagcaaggccagaaagagattcaggaccttaaaaacaacaaaaacatgattataattttacaccaatgtagggaagagcagattacaatcacttattctttcttttaagtgtggaaaaaactctaagttctaaaacttgatgagaaggaaacaccacagcatagtgattagaagatgggtgatctgaatttgtgactggctcaatagcacatccttggacaaagacatgatttctgttgctctcaagttctcccattcgtaaagtgaaattgaatgagctaatctaaggttttgttaactctaaaattgtatgagtagaagaaaacagatttatatgtgtacaatacgagaattcttaaaaatcactaatgtttccaagtatgcatttaaatgcattctataatttttcaataaacaaagatattaaattggatgtcaattgaaaaataaccattacaactcagaatgaagattaggagcttaacataggctgacacttgttttcttaatctattatatttctcatacttcattgttgactaagtagagctgtttatgaataatctctcatatttccatgagactggcacatgaatgtacatacctttagaatattttatgtattactatactataaacagtaacactccaaatttaagagagataaagattgatcagttactccattatggtaatctcaggcatcattagccattcgagaactgatgaactcaggttggctagtgcatctgccatatgacatagagtgattgaatatcatatgctgcaatggggcaaagaaatggcacaagcattatgaactcttaaagacaccactttttagtcctagtctggatggtaattttgcactttctctctactttttttagacttctctcttccttggctctgaatttataaaatggtcccagcacatccttttaggctcatctcaatatgatactctattgtaattcacataaaaaatgtgataaagtgactgacaaaatagaatttggtataaaaaatgcaggggcactgctatattgctgtgttgttaaagtgataatatatccaaggtaatggacttttaaaccaataatcatagtttgtttttctttttgacaaaacagtcaccattaaattatactctttttttttattatactttaagttttagggtacatgtgcacaatgtgcaggttagttacatatgtatacatgtgccatgctggtgtatttccaaaatgcatatcttaagtgggtacataccactaggtttccaatcaccatgaccatcatgaagacagtaaggcacatggcttgaccagcaacctccatacagtcccacatggtctctatccactccccacacagcacgcggaacacaatcaggaaggagtggaagaagtcattcatgtgccagcgtgggagttgacaatcactggcgatcttgcagacacaatctttgtagcttttaccaaagagctgcatgccgaccacggcaaaaatgaagacgatgatggccaagacgagggttaaatttcccagagcccccacggaattgccgatgatctttattagcatatttaacgttggccaagattttgccaacttgaaaactcgcagctggaaaatgaaagattaatatatatttgtatgattcttaaaagcattatatatattgagctttacctagaaatggtcattagaattcaatatcttacaatatctgatctgccctaaccgtctcaggctcatggctaatttttggactccctaggaaaagctggattttccatattttaaccatgtagatcattttctctgatggtgaattatttttctttccttttctttttttttttcttttgtcacccaggcgggagtgcagaggagtgatctcggctcactgcaacctctgcctcccaggttaaagtgatcctcctgccccagcctcccaagtagctgggactacaggcacgtgccaccacacctggttaaatatatatatagtagagacggagtttcaccatgttggccaggctggtcacgaactcctgacctcaagtgatccaactgcctcagtctcccaaagtgctaggattacaggcatgagccaccaagccaggcctcttatagtgaatttttaatgagtacttggaatccaactgttcttaatttgttttataaaggtggttctaaggccggatattataatattaacatctgaatctgaaatatctctgctgaaagatattaatttgccagtagtgtgcaaagtaacatcatactgagccctgatataagtaaagtgttcattattcattaatgctccttaggggtattcatgtagttacatccacctgcattgaaaaacttggaatatttcctataattctacaattattttcctgacttgtaaggatatatgtgtgaattaatgggcatgcttagtaatcctacagactttctctcctttgactttcgcaagatgcatattttccagagacagaattagaaaaagtttctgcatgcacatcttacatctgattttcatccactgctacaaagggctatatatattttcaagttactattaaaaggtgatgcattttcattaaaaatattttcttaggtctagaaatattaactgtagtagtctctagaagcaatacttagtgaaaatagcaactgagtaatacgttaacttttacgtaactatgttctttgaaataaaggttttcataaataattgagaatttttttccatgtaggaaaagtttttgacaatgcaaatgttacagaaaaacttacaatgctaatggttgtgtggcaaaaaaactatgacattgctatgcaagaaccctgattgttagaaaggtttttgaatttggtgctttttttttttttttttaccaatcgaaatgaacggagaacagataatccttccacattggcgagtccaagttctaccaggctaagcgtcacaataaaaccgtcaaagatattccagccttcttggaaataatagtaaggatccatggcaataattttcagaaacatttctgctgtaaagatcccagtgaaaacctaagatcaaaacaaaattaatctaattccaccagataataacatacatgacataagatttgctcttagaacataatgcttatgctattttcccacaatgattctattactaacttaaatttgtatggcaatttgtagttgatgaaagactttcatatacattatttaattttatccttgtggaaacgcgaagtagataatatacaattattactttacagataaggaaactgaggtcttcagatgggtgaaatggcttgcttgatatcatacagcaagaaaatggcaaaactaggatttgagtacaagtcatcttttttttttttttttttttttttttttttttgagacggagtgtcagtctgtcgcccaggctggagtgtagtggtgccatcttggctcactgcaagctcctgggttcacgccattctcctgcctcagcctcccgagtagctgggactacaggcgcccgccaccacgcccgcctaattttttgtatttttagtagagacggggtttcaccatgttaggcaggatggtctcgatctcctgacctcgtgatccgtccgcctcggcctcccaaagtgctgggattacaggcgtgagccactgcgcccagcccaagtcatctatttttaacagtgctctttccattataccaaactacctttttgtccagactttatataccacaagtactgacaacattttgcccatgagcacttttatttatctataagcttattcctatttccctcaatcagagttatacattcttatctattatactaggtgcattactattgtcattctttgttatgcacatgaaaaaaataaatttacttctgtagtataaatagtagaacttcaaaaatataactaataaaatgcaggttgttatgcatgatgcttttgttttctaccatcaaaaatcctaaacttcaaaccaaatattacaggaaatgcataaattactttagatagctctttccttcagcaaataaaagctagtattcctaagttgagttgactggcaaacactttaataatttatgtttttgaagcacaaaaaggaaaaattaagtggcaatcttcaccaaaaatgacctttgtaatcatataacacacaaaatgtactggaagttttcaatagttcatggttttgatatagaatagatggataaacaatacatgtactacttagatcctggaagaggaaaagctggagacatttttgagttgttaaattatttcttgcagtgatgatgactaagaaggataaaagagatccacaattttattttaatcttctacagtaagggaaattgtaataatatctcaaaaagtatgttcttaatctatgagctacttctggatcctgaaaaattataaatattgctgttgacttttcaagtagtgctgtaggcctatgcctttctcagtttttgtgagcacattaagggtgattatttttggcaaaaaagtagagtatagccagctaaatataattgcgattttgcaggggccaggaagcatgaaggatggttgaaagactgctatacacaattaaatgtaaacagtttttcaagcagaaaatttgaagactaaacacatttaccttccaatatgcttaccaagtttcctactgtaagcacattattgaaatggtccgtcattggatagtgctccatggccatgaaaagagtatttaagacaatacagatggtgatggccaggtcaacaaatgggtccatcacaaccaggttgacaacatgtttcacttttaaccaatatggagaacagtcccagattaagaatatgttggaaaatttataccaacagggtgggcatttctgcctggattcttcaagttctagattaagaaaaaaaaaaaaaagaaccaccaaaaggtatactttatacacacacatttatttcatatccactaaacttattttcagtaatcaacacatttttgttacagagacaaccttttttgtacttgttaaaaaaattacagtttactctaaacctcccaaggatatttcatcagacacacacatagagcccaggtaacaatgggtagttttttgtcttatgcactgacattgtggctcagcacttggcctcaagttaaatgagtggtctttcatgtgacgtctcaatgggaacatggtttagggtggtgtagatattgtgtgtgcaaccctatgtgaatgactctacattgtcaacctcagactatgagagctagaatagggattgatgtgacccaagaatcatctttttagcttgtttttattttgtgaaaatgacctgctcttcctctacaatcttgagagtacttaggatgaggctgaaaagggctgtactgctgaagtcttaaactaatggaacaaaaagagggtcactatgactaatgagattagaaacccctaacagaaatgctttgttctgcattttcaaagagttgctacacagttaggaaaacattcttagtcccaatatcactcattttaaaataaattgttaaggcttctagaatatctgagtagatataagaaataacagctcttgaattagactgtcttttcattagaatgcactattcccaactcacaaatatatttgtttgaaatgagacaatataagtttggtgaaaataattgaaacgaaaatagaatttgttaccaaccttctactgtatttgttagaatgctggctatactcattgctcgttgcctttgggaaggatcttctagaaagtccatggaaacgtggaaagaacttgaccttctctttctcatttcagtttcagtggttgttccctgtaaaaaaaaatgctaatgcattaaacaattaatttgagcaatatgacaagcaaacaaccaaatggtgacacagtgaatttcatgaaacacatgcatcatgcactttcatattcaattggtgatggcagatatttctgacttattgtatcattagcctggaatgttcaaactgttaaccatttagtcatacagcaaaaaccaagatgttaacttcctgatttcataattttataaaatacaaaataattttaatatagttgataaaactcttaagagatatatttaacagttattacccttatttctgaactaatagtaaaagcctagtaacttaaaagtcctacaagtgatcaaggcacttgatttttgagaaggtagctatttaattttaaggaagtataaatgattgcaacacacttagctgccatcttattttctggacacaagatgtagatggtcattgacaacacaaactctatgttaaaaagaacacacacatgctgcatggacaacagtttcatccagggtaccaaagcaataagtcatctaattctgacttagtcatgcctcctcatgctgatatatttccaagtgagtaaacagtctaagaagaggcagcatctgtttagaaattcctcatctgagtatacatccacaaacacataacatacctttgtacacagacaattattttatctgtctgtattaataatgtatttgtgtctcttcatttaattttgagaagacctatatcagcattttttagtaagaaaaatatgagtactaggagtattaaggtaacaatgaagctatctacttaagcagtgtttttgaaaatctaaactaaagcagagatcttgaagaatccattggaaagatttattacatacccttgacacttaaacatagaatcattcatttactttcataccagagccttggagaatgtcctgctatctaaattcagtgtgggtatatagcaaatcctccaactggaggcagtaattattgtgtctaatcaatccttagcacttttaataagtaaatgcattcaggtttgtgcaggagactgctaaggttttaagttttagttggttagtctattaaagatattacaagatgcaggtgcattcacagcgtgaccaaccaggaatcattctcaaggttgccgttctgtagaaacactggctggtgcagcaatagtgagccagccatgcctgaactatttaaaacttccttacattgtcatcagtagctggcttatctattatcacctctggcagaagctgtccaacaggcgatgtaggaactgaaggtccaccaaccaaggaaaccacaccattgcaatccacagtgctgtgcatcttcccattcgctggaaacactgccagcatccgggatgacctactggtctgactcaggttgctgttgcgtctctctccgtgtcgtcggggcacaaacaaggaatctctacggctctcgttatcctcaaaggtgctgtgctcatcatctgcgaagtcgttctcagatcccacatcctttgctcgccctctaaagctgaaaaggcttgttctgctatttcgccttggtgaaaatagggagccacggatgctcaacaaagactagaagtttgaaagagcaaacaaataaagtcatattaatatggacatttgaatgtgatttcattttgcaagattatgtagaaggagatttcagcattcataacagaatatggttcattccttttgattatcattctcattttatgtgcattcacattaaattaaattaccttgataaaagaaagtttctagcccttgggattaaagaatgaggagatagattgcaaccttaacatattgaaacacacacacacacacatacacacacaccctgaacgaccatttctcaagttcaaagggaaacatccttagaatatggcaatggacgtggtaaacattcagtgaacactggcaccatgaccttaacaaggccaccttggtttttatggatcttgtctttcaaaaactttcaacactcctcacaatttactttagtccacctttctaaaatcactttaattattatttctttttcacctataaggcattgtattgttggaacttgaagttcatacttctgaaattcagagtcatgtgccttttgatcaagtgtaccatgactaatattttcagaagcatgcatggtgacttataaagaagttagggggaaaaaaaacataaaatcataaaataacctaaggacattcctgatcgactatccggagttccacatttttttttttcttaaaagtgctgaggatcaaaaagattaaatgtcattagttatagacaaatatcagcagacagtatcagaatgacagtccagttctcctgactgtcaacttggtgttatcttaactacaccgagctgtagacttacatatctgtggagtaaagtttttgcataactatgtgaagaagggatgggtttaaatataacacaacagtggttgattcagttgataaaaattcctgagtccattttctaattctccccctctctcccatgttttaattttcaaccatgcatcagtaaactcagcagtgccatacctggtgtggggaggagtacctcttttcatatgtcaatcggttcccttcaatggagaagcgaaaacctttcctcctgatgctgtcctcagattcagatttttggaattcatcctcatctttctcttccccaccagactgctctttctgttttcttttcttcctccgatttcttctttccttagcactcttggaactcaacttagaggcttcagatgagctgtctgagagcctgcctgctgcactgggctctctggaatgttctgaggcagttgccgttgctgcctgctatattgaagagaaatgattttaacatagcacctgaagagactgtatctttctttgaaagggctgaagtatttgcatggcttttaaaaaatatattgaactgactgaagatcatctcacagagaagattctctgcaagtataagaggagattttttttttctttctacctaatgaaggcttttggagataatttagtttgctccatggtaacatttattatgtctctgttaatgctccacagaccacgtattcaaaaatatccaacatgtatcaacaagaaaataaattcattactttttgggatttgatttactttaaaaattggtatttaattagtgttgttttcttttctccgaaaaagaaactcgagtatggaagaaaagctgatgagtttaaggcaggggaatgggataaggacctgaggtcctttctctagttattgaaattggattgtccaataccctcaaaatattattaatcctatttatggacagttataaaatccctttctcacccatccacaatatccagaagaatggggaagggagaatcaatagtttctgctgagcaagataagacatccagttctccaaaaactgtccccaccatcttcaaatcagtactggttcttaaggggcacatgggcatggaataaaacaatgctttttgattatagcttgtactggtactaagttgacacttttttattattatcattgttcccagggtaacctcgataaattaattactcttgcatataaattaatatttctgaaacaactttcttctttagtaaagacaataagtttgtatgctaaacagaaagatgagagagataggagaggcattttatgatttatcacactgtgaggactaacacttcactataaaaacaagtaatcctttttagatggtcaatctgtgtaagattggtaacattcatatgtctattggatgctgctgtatcagagatcattatattatttgatcacttccttataaaggtaataaagcaaccacgttaaaagccaacatatttttagttaaagaaaaaaggagactatgtttaagaactagaggagcaactcttcatatgataaccaataatttcttgttctaagaaaagatgatttcctcctaatgccagtctactcattgaataaaagtctctcacttgaaaataccccaaaataacattttccctttactttgagaatcttaagatgattaaaatagcatgagagagttctattgtggttattattatacacatctcaaataaaataattaaactaaataaaagtaagtggatcatcaaaatatagaaatcattattaattcctcatacaaccacctgctcttaggtactcactttctcttcaatattacgtaacaatcagaacgataaaaggtcagtgccatgagacagggcagctttacctgagctgcctcctgttgctttttaagctgttcaatcatctgctgaaattcggcctctttctgttctgcttcttccaaggtggcctgattctgttcctcgtaggccatggccaccacagccaggatcaaatttattaggtagaatgagcccaagaaaatgaccaatacaaaaaatatcatgtacgttttcccagcagcacgtaatgtctgcaaacaaaaatatcagaattatttctcaatattatttcactaagtggtggcttcaactttcaatttactcatgtgtctagcaaaactcagatataaatagtaattatgttggtcatagcaccctgtactttttttttattgtttctttaacttcagcttcttccttctcttctagcttatgcattcacactatgatttctatggcagaatttttgtattcaccaagaatgaaacagtcaataaaatgccatggagtcctccattaacgacctgagcctttaggaaagtcaaggaacagaccaaagttatctttctatatctgctttttcattttcattacttcccacctgagggataatatttgagggggtagatagggctgaagggagaatgtgccttctgtttaggacaatctgtgtctgagaagggtagggaacaggttttgagccaagaagaaatgggagagaattgcaatccttggcatcactctgctcagtatgtgttataatcaataggatagaggaactcaagtctcgtttcaagttctgctctttctactatattatcatccggttttaatttcataactcaattggttttcttgtatacttttacttaaatggagagtgtggctctttagttctcaccagttgataaagattttcccagaagtcctgagtcattagtcgaaacaaggacaaaaaagcccaactgaaggtatcaaagcttgtgtagccataattgggatttctaccagctttcacacacatatatccctctggacattggctgcaagtggggtaaaagaaagtattacaagtcgttctgctgcctttttactctgatactatgctatgatattgcctagtcagaaagatttggtatttcaaaataaaagtttgacaaataagtaactaatctatttcccaacttttgactgcatatagtcttattagctacttggtgtcatcattaaaatatggtgcagcatttctaataatattttacaaaataatttttgttgataatttgcattttcaacacctccatttcatttttactactatggagtctccagagtttatagctcaatatacttatctaaaagaacaacattgttattattatatactcctaaaaaagtaggaacaggattactcctctttttgtatgtttgctgttatatacagtaggtgtttaatagatatttttctctttttttatacttttatttgaagttcaggggtacgtacatgtacaggtttgttatataggtaaatgtgtgtcatgagggtttgttgtgtagattatttcatcactgaggtattaagcctagtacccactagttatttttcctgatcctctccctcttcccaccttgcacactctggtaggccctagtgtgtgttgttccctatatgtgtccatgtgttctcatcatttagctcccacttataagtgaggacatgcggtacttagttttctgttcctgcaatagtttgctaaggataatagcctccagttctatccatatccctgcaaaggacatgatctagttattttttatggctgcatagtatcccatgatgtatatgtaccacattttctttatccagcctatcattgatggacatttaggttgattccatgtctttgctattgtgaatagtgctgcaatgaacatacgtgtgcatgtgtctaaaagtattacttcttgttttagaaaacataaatcttacctaatatttacataatctcatactttatcaaaaaccttacatatagcaaattaatgtcaataaaattagttggctgttatcttcagtttctataaaaagagagaaaagatacacatatgtatgtgtacatacaaatatacacagatacacacaaattattgacttaccctgcatcagagctatttccacatagtagtgcatctaaaaaaccctccaggaaataatgatatcctgtttgaaaaaagaaagtcgtatgatgaacatttgcattgttaaaaacactcaaatgagaacaggaaggtcaggttctacttttaagtttattgagtaattttaaatatattattcattcaaaggcacaagtatttgtctcttctccctctaaattctagatattctattagatactttacagtgcaaagtatttcttcattatgaagaaatgacattagattagatacagtgcaaagatactttagacactttacagtgcaaagtatttcttcattatgaatgtaaagttagtgataatgacaggtactaacataatctttcaaaaaggtattagcatttgttcaccattctcacgaaaaaaattcattcagtaaaaatagacaggaatgacaggaatttctttgtttttgcaaaacagccacatatttcaaaataaaagaatagtatattttctggtcctctcgcctatatttttaacactatacattttaataattaagtataacatattctcacattttgcagaatataggcaacttatagtaaaatatgcataaatcatatcaacaactgaaatgaaagcaattttaaaaagtcttaaatactaaagctaaaataatgactataggtgaacactacattatctcaaagattcctgtttcttgcaaactccttggcttcttgcaatgtccagttcttctataactttttccttggtattttcaactttctttctactaaatattgacataattaagaactcccctcactgtgctaccagtaacctgtatatacttgaattattcttaggatgacactactatattgtaattatttatttacaaatattcctcctagaaagtcccaatcattaattatttctatattagtgtttgtttgagaccgggtagcctttctgtaaagtttattgaatgaataagtaaataaaagacaaaaagagaaaaacatggaattaaacaatcaatgttggattttgtaagaagatatattttctagatgctaagttttctgaggaatttattccatacatagttctgtacaggacacagaagcacataaggaaaaatatcatttttatttctaatattctgacttccttgaacctagacaggaaagttgacatagtatttcctaactttcaattaaaattaaacaaagagaaaggactataatagtttctggatgaatttttgatatctcatatttataaatgaagttttgcccattaaattcaatgatctaaccttaatgatcagccttaacctgaggaaaatataatttttcagttataatagttacctttaattttaataaatttaattttctattattttcagaaatgaaccattttatttatatttgcatttggtttaaaataagaaccatagatgtttagagctgaaaatgacctcagatattattttacttcgagtattggaaaaatgcagtccaataaattttccctagagagaataaaccctaaataaccctcatagtcagtattttgaacttagataaaacaaacaaacaacagatttcagggagctggtgattgaagtggacctactggcattcgtatcaccagctactaaggaggctgagatgggaagatgccaccacacccaactcattaaaaaaagtatatatatatatatatatatatatgtgtgtatatattttttttttgtagagaaggggtctcactatgttgcccacactggtctcaaactcctggcctcaagtgatcctccagcctcagcctcccaaagtgctaggattataggtgtgagccactgcacccaactaacattttctattactgtctcctgaagctttattaactgtaattttcttctttttaatgtaatactactttttaaatataagaataagatttacttttaggtatcactttatttccttaaggtaataaaataatctattaaactataacactctgaagccatgcattacctccattattttccccagtgtactatacagtttctgatacattaaagacattgtgtaattaatgtataatgagttacatttgcatagtattgtagaattcgcaaagggcattcacatattttatctcctttcattatatcaatcaccacaggaagaatgtatagcaaccaaggatcctaggaaaattctttctagctgaattcttcagccttccaaatgatgataaaatagaaagtggcatttaggagtcaaaactagagtagttatgaacaaagttgttaaatgtatgtggaagccattgataaggtgattaacaaaattcttcttttagttccagaaatataaataatctattatttaaaatccagggggtagaaataccaaataaaatataattttaaatattgttaaatagtttgattaggtaattttctaaaagatcacgtcttgttatgtaatcatttaaaaatatttttcattcctagatggaaggcacattagcaatgaaaagaccaaatatacatgatagtaattcttttttagagggtgttttatttatttcattagttttaaattttaaattttaatttttgtgggtacatggtaggtgtttctatatatggggtacatgagatgttttgatacaggcctgcaatgtgtgctaatcacatcatgtaaaatgggatatccagcccctcaagtatttatcctttgtgttacaaacaatccaattctactttttaaggaaatgtacataacaataattcttacttgaatcttgaatatatgacttccagtcaaactcaaagacagtttcatttataagtgtaccattataattcacagttatattcttttctatactatgttcctccaaggaagcattggtgggaggccattgtatacatttattcctcaggttgcccatgaacagctgcagcccaattagagcaaatacgctcagacagaacacagtcaggatcattacatctgagagcttcttcacagactggatcagggctcccacaatggttttcaggcctgaaagaaagaagtctattactatgaagacttaacacgtgtgaaataataaaagcttcacacaattttcttgaaaacatagatttcattcataaatccaagaatgtttgcaacgctagtggagaagcaacacttcattgaaggggaagaacttatgaagataaactccagaaatgtaatgatttaaacaatgaaatgaagattcatatcccattatgtcgagatagagtaatggaaggttcatgttcttcatggagcctatattaaggaaagggccttgtctttttcctttttgctactgaaacttgtctcatattttcattagggtcagaggtcagttttataacaaaatacctgaataaatattttaaaattcctatttataagtaggaaagattttgctgtacaaccgaaaatggtctgcagtataattgtgccttaagataataaatcctccatgcagactcacactattctttattgtcttattcccttctcttttgttagcaaaaaacttagaagatttgcattgtatacacatagtcattaatgactctaatgaataagaaattacagattggtacatttaaaagggagcaaattctcgataaaactaacatggtgaaaaaaaaaaaaacccatgatatttgtaagtgcaggtcaccttgacctcaaattacagtatctcacataagacattgttaaactccaaggctgataaagcttatgtctaaacaataagaatcattttctttgaaacacctagtcttatgattcctgattttctgtaaaactgaatgtcaagcagagaaggatgctgaatcacatgatgggtccgtctcattatctaaccttgctctcacctggaatgactgaaatcgtcttcaatgctcggagaactctgaatgttctcaatgccgagacattgcccaggtccacaaactctgtgacgtacctgtaatagggagttcacacacaaacacaaaaacaggacacaaagaaaaagctgtaggtacaaagagcctatcctttactctaatcacttcttacctggaattaccgaaatagttttcaaagctctcaagactctgaaagtgcgaagagctgaaaaattgcctaggtttacaaattctgttacaaacctgtagaattaaatcagaattattcaagattttagcaggatttatattacttgcatgggtcttttataaagaccttcttggtgattttaaatgataaatattataagtggtaaatcaggaattagattccatcattaatctttgttcacataatttaaggccattagctaaatgtaaacttcataaagtagacacccttgttgtcactctggaaagcaatgcaaccaacatcatgtgtaacttgtaaaaagaaagtaaatcttggctatggtttagggttttagttagaaaaaaatatatgaaatcacccaacagaaatttaggcatgaaaaggcagtttgccttactgcttttatatatgagataagattttcctagtgtaacttttaaataaaagttaagcaaattaagaacaatacttgatgagggtccaatgctgcgcctattgttactgccattttgttcttaagaaatagaagtcctgtaggccttcttttgagctgtgaccagagagcctagcaaagaattggctcatcctgatcagataggaaattaagaccagacattcggagtcctgagtgtatcagtgccacctctcctgctcctatccactacatcacaactgttagaggccaaaaaatcagctcctgaaggaaggatgagggtaagtgttgttgggctgcctccttctacactctactttcacttagtctggaatggttttctattatttttctgggtctcttcctgaggaagtttgccactagaaaaaaaagcattggggtgcataaactgtgcatattactgagtggatatgaataggagataaggataaggaagtttatgttcagactaaagagatgaagagagccataaaaggaaagaagaaaagaagaaagaaaaggggtcaggagagaaacagaaagaggcagagagaatgtattcctctacaggtcttagaaatcagtaatttaatatattaaaaacataatatttcaagtatcttctttcttctcttagtttgatttgtcagatcgttttgatgctagtagatacttactttcaattattttaccaaaccaataaaagaagctgtgtgtaatatcagcaaggtcattgcaaatttgtgtagccaatagaactgttttgtggctgtaatttttaaagttattttcacagatgtattacaaatatgcttgtgttttgacattagattgtgtgtgttcatatgtgtgtgtgtttgtgcatgtgtgtgtggaagagtggcatatgtgaaattttctgactgatgctacgtgtgaaaattgtagttttcaactactgcaaagccttcatgctatagtgaaattccacttagacctttgttgtgctaaattgaaatccagagtttgaatgtataaatcacaccaaaatattctacaggtaaagcaaacctattcttaaaagcataagcactgatggaaaaccaaactatgttctctcttaaagtttcaaaaaaggcacttacgcaaatgtaatgacagtgaaatcgagccagttccatggatcccgaaggaaagtaaaatcttctaaacagaatccccttgcaataatttttataagtgattcaaaagtatatattcctgtgaaggtgtatctgaaaacaagcatccaaaaaatttgataaagtaacagtgttttttcatagcataccaatttcttatcactccatcagtggaatagataaatactaaaaaagaaaactaagcagatggattttaatttcatacaaatgaaacgtagccctaaatttaaattcagcttcctaacacaaagagttgtttcgtaaagtgtcttaagagtagtgtgagaaatacaaggtatatgaaatctatttagccattgtctgaaatgtcttggtatttatgtaaatatagtctcctgagaaatatttagtatgtttacatgatggaatagccaatcaataatattgcagaagcatgaaatgattttcttttagggaaaaaaatctcaagtttaatagtgttctaagaatgagaggaaactgacaaattagcacgtgtttttttttttctacaagataatttaacttgcttggaacaaggacttctttaaaatcaaagtaaatacttctagggttataagaagtaaaaatttaatttagaataaaattcttctgataattcagaaacttaggtgtttccaaagtttaaatcttctactcagaaattggggtgtgagagtggcataaaatcacaagaaaactagggcgactgaaaacctgtggggcctcccatattagcttcaatactttagaatttttttgtatataaaatttattattttcttcaagatgtcatgtttcttattggtttcagcctggaagtgtctaggaaaggagacactcttggaaataggttggtgcaaatgttggtggacactcttggaaataggttggtgcaaacattagcttcaattgaaggtaatggcaaaaaccacaattatgtttacaccaacctaatacttctgtagttgctatgggtcagcagctgtatagtaacaggcattacaaataggaagtgtgggcaggtgagcagctatggttagagtagcccaacttcagttatcacaaatctggcctctgtgcttcgaaggtatccccagaacagagagatcatcaatatagttagtaatgcttctggtttctgaaagctctacaaaaagttccacttctgttagtttagtcttcagtctactgaattttcaagttctacaaccctgaaactttggattatttttcaatttgttggtgaccacgcttggaactatattggcctgacatgaagtgaatgtgcctgatggaaatgaaaactttgcgaggttcaatgttgtcttcacatggcatttgtaactaaccctttttgattcttgattcaatgtatttatctggaatttaactggaaccaatgtctaccatattggctcttttctgcaattgctttgaccacatttggtttggctactgtagattttaaagaaaaaggggtaaatgtccaagagtggtggtcttcaggtgaacaccaggtacaggcaaaagagagtgataatcagtataacgccagcaggcctgagggccaatgagcattgtcctcttgctgcgtaattttgtctaggaatgactttaataaaatgctcttcagttttattttaagactacattaagacacagtttcaaaatcccaaatgtatatatgttattaaaaatataagttgaacttactctacattctttgtccaatcaggagggttactcattgtcataaacacacagtttgtcaaaatagtgcacataattagcatgctgaataatgtaggttattgttaaggaacacacaaaagaaaatcaaaatccaagtgttatattacaaaaagctaacattgaaaagcccaaactgcagcttagccaaaattcagggataaatgcattgtgggcaagtcttctaatctccttacatttcaatttcttcatgtgtaaaatgtgggtaataatatcaccttcactgagtatttgtatagattaaatgaggtaatgtatatgaaagcattatatcagtataaggtgttgtttttacaactattattaaatcaatatattcacctcccagagaacttcagtgggaagactatttttgtgctacctggagttgcacagtttttcagcagaaagtattgacttgagctcattcaggtgaataaactagtaaattgttgaggaaggccacttatctgcaatattgtaatttcttaaacacatcttatccaacacagttcaacgcatgaaaacaatttgtagtcaaagtacagcacgatgctaattgttgggttgctctattttgactgagtttatacaagtgcagcaggattcgataacattaaaagtgaatattcttgaaggttgacacttaacatgatgggaatgtaattaaaattcaacatagcaaagtgatgttggccaagagactcaacctctctgtgccattgccttgtatctcttcctacttctctacaatggagctaataatgtactcattttgtaatgtaaccatttctacatgcagattaaatgagttaatgtattggaaatgcttggaacagtcacggtacgtaagtaaatatactctaagtggtagctaaaacaaatgaacagacataacagaattataaaactgaaagggaccctaaaaattagtttatcactatattttaaaaatcagggaaataaggccttactaagctctagaggaatcagataaagggtccaggactagaatataagtttcctacattaagatccaatattctttccactatagtttactgccaaaacaaaaattttccataattgaaaaagaaagttttcatcaaatgaccacatgatggcgctaggaatacaaactgggacaaggaaacttccctaagtataaaaaccctatcatatgatttttatgtttcaaatcttttaattttagtaatagcatatttataccactaaagaaatttcttgctgtcatattaaaattagaatggccgttcaaattttagaatcctttaaaaaaaagtatgagcttatgataattataatggtattttaatatctattattgtcaaagctatcaaacaagatacaatcagaagtgaattgttttcctaaattgattaacaaatgaatttagtcgtggagtcctttttaacaccaatgggaatcatgaaaccaaatcccttaagaccatttggaaatatatgccaacttctctcattaacttccggagtctttactaagcaaacagttttgcatggcagcatcataactcatgacttgaatttgaaattcagccaatattccagtacttccttcacaaaaatcatcaggaaatttcaagaattaactaagtactggccaaagactcctgacattctctgacagaaaatatacttaaaggtttattctaagatacactgaagtgttttatatcataactatggataaacttgagtctggaagtagatttttctgttatcatatcattgctcactgaaaattctacaccatcacaaactttgtataaagatggtagaggtaaacatggttatcttactttagatttgtaggattcaatacatataagtgtttttagaaagataacaaaagtacataaatacatgtttatatataatatataaaatgttaaagagtacatgtttcagtaatgtctatgtgattaatgaactttaagaatgaggctaatatgacaaagatgcaaaatgagagtgatgaaaactatataatatggacatttcccaacttaatttgatatttagctataaagtgcttacagatcatgtacaaatagttaatattaatcacttgaaaaaggatatgaatgtaccaaaatcttaatagctattttcctaagaggattgaagggagttaaaatgtacagggcagaggtggcactgaaccggaagatggccttccctttattcaatactataaaagtctgtaagacaggaacacaacatagaagtatgaaagtataaaccacttaaactctgttatctactttctgttacttgtcataataaattattgtaaagttaaatgagaaaccagcacaatcacaatttctaaagtgccccatgaaaacaaactgtcactggatctcttcttaattagagaggaaatccaatgataccacttaccttttacctaatacttaccctcaattttattgtacataagacaattagccaagagaagtcatttattttctcgatattttaagtgtctgagttaaatgaaagtcttaaatgggtgcacatttcatttcattccaaaaaacttaaggcactacatgctttttatagtcatttcagctttcccaattcaaatatcttgaaaattaatcctgtggaacgcaaaatcattcaacagaactgatactatttttgaaataaagattgtttttaccatctatcctcataaaataaacattatcactctcttcgtaatagaaaataaaaacagccaccatcaaacccactcttgggttagatggatgtaatccaataattgatttctggaggccaagatccctggagagtacccgttgaccaggagtgctaaattctgtactgggatttctgagttagctgacatattgaattctaatcccaattgacttcctatcttatgcagtgctttcttatcacagaggagaagctccaagctcctgaagaatccaggatccatgaatgtgaatgaaattccttccaaaaattagacttatttgagatcaattggcagtgggcagacaaaacattaaagaagcaacatgtaagggtataaaaagggctctgactcaatgttttccaaggtgcttacttatatttagacagagccagggagaaagcctttatctctgtgaagagcatatttggggaaggaaattttaagcttcttgattttaaattcacccattcttcgaaagctttcttttctaagccttaggatgcatatctgcacagatcatgttatgatacagcaagcataaatgttatgtttattttctactaagaatctttgtatagtcttagctcattaacagatttcccctatacttgcaggattttctaaattcaagtaaagcaaacccaccctcccacacccctacctgctaatggagttggtttttgaaaattaagcactttctatctggtatgggtagaagtgtcctaaactggctgtgaaagtatggtcccccaaccagtactggttaagtatagatatggagagtccatgtttagaaatttgtaaggcaatttggccaattaatgttgtgtctgtctattctaataataaaaaagtagggggatgttgttgtgggcctgtttttcatttcagttttctagaaactaatttttacttcattttatagaagaatagagacctcacatcctcaacagagtttgagaagcactgctccaagtctcacctctgcctgcattccctctatcatctttgaaggagtatgagtccagaaaacagatagagctttaccacaaagcgcatttgaaggaagggagaatttcacctgtgcttactagaagaacaatcccctatgccaacaatacttagccctctttttctctgattcattgagggattctgtccctgaatgacattgtgagatcatcgtaaatctgaacagacttgtgcaatgcaaatgcctttgctgtgggggaatatgagcatgtaacgacacagaaaggcccaaagtgagctagctcaggaataaatatggtccacctttcaaatgtactgcatatacttcctttccccccagatatgctgagtaaaatctgaaagaaatattaggggctcagatggccagtcgcagtggctcacgtctgtaatcccagcactttgggaggccaaagtgggcacatcacctgaggtcagaagtttgagaccagcctggccaacatggtgaaaccccatctctactaaaaacacacaaaaaaattagctgggcctggtggtgggtccctgtaatcccagttgcttgggaggctgaggcaggagaacaggagaatcgcttgaacccaggaggcggaggttgcagtgagccaagatcgcgccactgcactccagcctgggtgatgagagcaaaactccatctgaaaaaaagaaaaagaaatattaggggcacaggtaggagaaccagtaaaaatataacacagaatatatatattttaaaataagaatctcttgatttcagataatattaaaagctaattttgaaacaaatagtagtgatacaaagagataatgagaaagaaatgacaatccatagatggcctaaatcatgggctggagtgtgaggataatcaagatggtactgtttgtacctccgtggataaggaaaataaccaggctcatcctaaggagacaggaccatacttagaagagaacacctgtgatgctggctccttggccactgttcagcccaaaccatgaccagaggtaataaatgaccaaaacagaaaagacagacaaggagtggtaaagtaaaaggcaaagctagagatctaaaagaagggaggggaaatatttctgccctgagtactaaaaagtaaaagaggcaagattcagaaaccaaacacaaaaggttccaaaaaggaagtctgcctagaagtaaaaagagcagaggattctagacaaaaatcggggaaaggtggggacagagagaaatctgttaaaggacacaaaattacaactagataggaggaacacattctagctctccacaccactgtaggatgactacagttaaaaataatttattatatagtttcaaatagctggaaggaagatattgaatgttcccaacacaaaaaatgataaatgtttgagatgacggatatgctaattattctgatctgatcactatacatcatatgtattaaaaccactatatgcttcataaatatgtacaattattacgtgtcaatttaaaaaataagataaaaggaggtataaagggctgaaactaagtaagatgagtttaatgaaaccaaagcactctcaatgttggtatgtgattctaaatctaaaagtcctttgacatagagaaaattaatactttgacacaaaagttaaaaacaaatgggcataattatcaattgttcaagccttagatgaaaacatttactgattttacagtgtattccctttattcattttaaaaatttaaagaatgtgtagaagattatttggtaacaagatttatatgtgcaatggaaaatacttgcaagttgaatttataaatggaattggtaaggtttttactgaacaacggtatttgttttgctttaatttttcataagacatactgttgtgcaagacatccttgctacccaggaagctaacaataaggccaacattaaaggaccattttttcataggatttcttctgtgagaactccatttttctcagattgaaacatacatgcttatgtacaaacttcatagatgtagctttaaggtattgatggattttaaacagccttccaataaagcaacagtacccagacttgtatagcaacccaatatgtataattttaaatatgatagcactttcatgtcagagtaagttccatttagaatgtcagtcttattatatgtaattgatcttatgtttgtttatttcctcaactgtctgtatcttacctccttgtaattgcttacatagccaagaagccgatcattcagtttataagtgttaagaattaataaaaggatacttgtttccaaggactctcagatacagctttctcccaaaagtggcattgatgatattgaagggagggaagagtctgaaggaaatactgtttgcttacaacaaatacttaagtagctctagagttttcaaatatataaatatttgccttccccgctatacgtataagaaagggctccaagagggaagagttcaaagactagctaagatattgctgtaccttaaactgtataaacaaatattgtgtagctttaagctaatcaagatttatgaactattaaattgggtgactttttaaaaactttttaaaagaatgtattggttagcttattatagtgaagtatcttagcatcctttaaatctaattagttcaacaaagatttcattaatacaacttatcaggataacttttattgcattaagtcatttgaataaaaaagaaacagttcaaagttggtggtggaggagaaaaggtttatacagtagtatctagcccaaaacaaacccctttttaccacccaaggctcataggaacattgacatgactggctccacttacaagcagcaagactttgtggtttagtacaattcaggcacatctatgactattcttaatatttgtccttcagttcattttagtgccaaaacaaatgctttaattgcagttctacaaagaaatagaactgtttgaaattaataacatcattttaacacgtggataattttctgcttcaaaacaaatgttgaagcatggcattgtaactgaggtaacaactagattttatatatgaaaaatcactttacagacttatttgcaggaatgtaacattcatacaatagggttgttctagcttgtcacttatgtcttcatatacaggtaccaagtttattgggcatatatacaataagttggtaattatgtatgagcagggacctagtttaggtccaattgttaatttcaattgatggcaattcagaatacatgtattaactgtttagtacaatatttgcaatgccctgtgctacattctaaagagaaaacaaagatacataggttatgacaccaagacatttataaactaggagatgctcaactatttgttttaatagaatatagaagaattgatgaaggttaccttgaccagcactttccaacagaaatataatgtaagctacaaatctgagctacagttatgattttaaatttcctgagagccacattaaaagaaaaacaaagcaggtgaaattaattttaacagtattttctttaacccaacatatctgaattattatcatttgggaatgaaattgatataaaaaatttttgagatatgtatatttttatactaagtcttagatctttgaaatatggagttacacttacatatttcaaatactcaatagctacacaaggctaattaatctctgctatattgggcagcacagacctaaacttaaaccatccattgttcagcaagctcataccttcttcagcaatccttgccatgtaaaaatcatttctggttttaaagaaaaagcaagaaggaagttatatagaaaaattggtaataaccctggtaattaacagtttaataatctgggaagcaacattatgaaaatataagtatgatttgttttatcttatgttaagggtgcaaactctgaaattagatttctgattcaaaagctaactttgctgccttccagcagtgtgatccggaacaggtttcttaactttctgtgactcagttatctcacttgaaaacagaataaatgtacttagctcatagaggtaatgtgattccaatttagctggtcagattttgatacctagtttttatactttaaataagtaatccagatgattctgtcatagcagggctgttaatatgtttgttacctaatggttgtaaaaaatcacaaaccattggccaaattatcaatgattatgttgtacatgtggattgaaatcttgccccttgatctaactgaatagttactaagaaaataattatgttataatgatttggtagaaattgctatttatgaagctatatttgttattatctagtaatcttttcttgtttctgggcttatagaaagtgatttgtttacaattttttcccaggatggacattgaatttaacaagccatggttttccagtttctttttctcatttaaatatagccattaccttaacatttatttcaatctaggggccatattcttcaaagtacatagtttaaacataagctgtaactttgtgtttcatctaaacattattgaaacattgccaaataacaggactgactccaaatttattgcactttcctactcttaaagtaaatctactggcaaaaacaagaaataacacaggaaggtgagctatgatgatgaacaatacacaaaatgtagaatatactactggttggttaaatttatcctttagcttcaaagtttgaaacaggcaatttccaacttgtacatgagctgtgctccagaaatgcatttggaagtcaattgtttggaaatgtgaacatatattctcacagatacacatatatttctagacccacaggtctatcaaactgttaatgaagtacaattctgaatgaatggcactgagaaactttatcactatgtgtaagaaagtgttactctgaaaatggcagagttctgtccttgaaatagcctggaagtcagaccaggaaaattatctggctctagctcctacccagaagtgctattaagtttttcatagctctaagctgctggcttggaaagaggttccagcatgaagggggagaattagagccatgttgcaagaggagagatgcttcaaagttttgggtgtgaagagcagcatagatggtcaggagattccattagtataatacatatctctggggacatttcttatgctgggtcaattccatggtatataatattttttccccaaggactttaaatggtctcacctacttcccttctcatttgtcatagcctgtgagttcaagccaagcttttcttccttttctggctcactgggggatgaaaagttttcttgcaggctttctacctgactctgaagagagtatgccatatttaatattttttcatctcctagtctcattcaattttttccttccaaccagtgataaccagactaaacaacaatctgtgtcacttgcctacccgtgggccaccaagctttaatatatagccttcacttaatgacagatgtggtccttaagccacagattacaaactaaaatgcccacagaggctaagtgacaataggtacctgccagttttaggcatataagtcagtgatgcctgaactcatatttcaagaggaatccttagatgtataattttatgagtgtgtgaaagattttctgatttataaatgccagaaaataattcaaaattataaataattttgttagtttaacaaaacatgtctgtggactccatgcctcacagtcagtttttaaacattgttgccatatgctcacacaaaagagaagaatttgtacctagagaagagtctgtaaaattgcttgttcctatgctttagctgggtggagggttggggccagtggaggagataactctgcagaaggtgcctccctagaaagtgcctaggtaggcttttgtcagccaaggctgcagagccctcaacctcttctccagcagagagaagaaattataacaacaaggaaaaagaataaaatctggagctgaaacatttttcagccctatatcatcagaatgtacataccatgggtctgctacactattatatggtcagttaatttttctttgactggaaagaacacttttgagcccagcttgattacaagcttgctgtgtgagaactatgagcaaactattcccctcaatttctccatctcaatggagaagattatactaataccaatcttaggattattttgaggataaagtgaaataaaacatgtcaatgcccttagtgaattctaaagtgtcaataaaaatataaggattaaaatatttaaaatgcgtctctgtattctaactcttaaatatacacatataagaacatttctgtttctccaaagcatggccaattttagtattggaattttcaggttcagtatctttcttctcaaacttcctatctaagaaaatgaggccatcagcttccttctgtctgacacctaaacacctccaaaaccaattctgactctatccattattctccatctccattgtcaaaatgctagatcaagtataaaactcctaaatttctccatagagaagttgagtgatttttaacaatgtaaagtggaccatgttactgctgtacctaaatacttgttgggaattcattttgctttgaagataaccttcaaactctttaagatgtactgaaagatcccctttatctagccccaggtctacctccccaacctcaccttattctcttcttacctattacaggtcagcttgattatatgtcttattctatgctgttctctttccttggaagattctcctctccctcctcctttttaaccttcagatcccaatttaaatgccatttccttatagaggcacacaatttaaatttcctgaattgatcctctttgaaaataggtgcttatcaccctactggaatttagtgggaaaaaaaatttctaattattttagaagctaatctagatcactgagtgtctaagattttagtttttcctttgtcacctccctgtctctgtctcagaaacagtcccaagatggtgatgttgataaaaatgaataataataataaataaataaggttttacaaaggcaggaaatggccaagtgttgaaatgaccagtaagggttcgggaaatactgccggcctgggagaccagaatcacatcttgcaaaatggcatgagtaggaaacaggaaggacagctataggcttatttagattccatcactgacttctcttttttttttttccactgctgtgattagtgctatgactgcaaatccaaactaacatggcaatgggccatggaaactcactggtctagttttaaaactagtcttaggcaagttatttaaactcagttttattatttttaaataaagacaagagctatcttgaaagaatctgtggattaaaaaagaacagtaattatactgatattatatatagcatgtagagtacatagcttttttttttttttttgcctgcttaggacaccttttctaacagttcctcttctcttccttttggagtaaatctctgccccactgtcttcccatgtggcttggtggagctgacccaccccttggcaacacaggttagtatatgacagagaccatcccataccaaggagaccatcacataccactagccaaagtgagtggttcagaggaggccatgtgacctaattagactcaattctaggacaactgctagagcttttgaaggaaacctgggccttttttctttcttctttcttgttttagcagaagatagtagttacaaggctgtaggatgttagtttagcaccactggtggctatttctgccatcttgtggaagagccagcctgcaaatgaagccagcatgggtgacagcagagctgaccatggaaaaggagtaccctcatgacattgtttgaggtactgggtattttgatattaaaaccagattcactagacacatttcctttatttttccccaaaagttgtttctgttgggttttggaaactttcagttgaaggatctcctatagatatggcagatactctaaaaatgccaagcatcattttattgatcaacatcaccatcttgggactgtttctgagacagagacagggaggtgacaaaggaaaaagaagcacaaggaagaaatagtgcatagggaagagaaagattgggaagtcaactacagggtcctggatgtaagggagagtctgggtgacttttagttttacaggagctgatgataagcaaagaacagctacacactggggactgcccatatgacaattcgtgaaattataagcttttaataatcatcctcttttctgatttcccgttaattacttttgcaagaaaaactccataattccaattaaaaacaaaacaaactctctccacccaatttaacaactaaaaactcctttggcagtgatagaccaaacatgaatttgaaatcacaaattcatatatgacttctcatggagcccaagaaaaagggagtgtgcatcttttcaggacagttgatagcaagagagaataagttacttttaaatgatccataggactttttaaaaatgaatgcatttctgcactccataattaacaaacatccatttttactacagatctaaaatgtctcattctatttccagtaaactgtcacattgttaaaatgatattttcttccatggtaataatgattcgtctgtaattttaacaagaacatgagaaggaagacattttctgtaataaagagtgggtaaagaatttgaatgtagggccaaatggtacaaaatcagcccaagctatgaaaggaaactgtgaaaaaaagtcccgtgagggaaaaaaaggtgtgttcacaagctaaaatgtgccttgctacacagctaaagtaaataaacaaacaaagggaaaccaatctggaatcatgttctaaagaccactgagtcagagctaacatgatatgaaaaatactgtcaccatattatgatagcatttttttcccctgagtttttaacctggaactctgaaggcttaaaacatctgaggatctaaaaaccttctaatgcttctatgcatcaggaatgttcatgatgcatagatgctactatttctttagttactactacaatattactgaacatggattaaactgctttaacaattttagtagaatatttgaacattacataatttgcacatcttaaactgggacaaagaggataaaaatatgtgggcatatgccattggaaaatatactctcagcagtgacattttaataagctcactgacactgcctttgtaaaagattacagagagcttcagtgtggtggttgtgttttttctattcacataaattccttgcatgtacactactgcactttaacataaaatataacataaggaatggattctgcaaatatttttacaattggcttgttttgtctattccatatagttgagaaagaaaccagagtctttgtatactgatgcaaatgacacattaactattgtactagagtccaactttagggaaatcactagtctaactgcatattccatttcactcaggcaaatctaatccacacccccagtatcagcattagtggaaaatctcgtcctaataaacattttccctggtgacatttccactgtttgaccatttagctgtgtcaagagtactgtgtatgtgtaccgcattgttttaatgaagatcacccagccaatctcagataacccagtcactaaagtaaaattagtcatcgaatattgaaagaaatattcattatttttaaaaggttcagattttgctaagcattccaactttagtcagagcaaattaattccatttaaggatatttttcaatactgaaataatccaattagaaaagaaaattaaaggcagaaaaaagtgtacaggcaacttataaaagtcttaagacataaaaatgcagaagaaggaaatttcaaacacataactcaatcatgtgttctaagcacaccatgttagtttttaaggatttcagccctgcaaaaagcttcgtgtgcattgctgttgaatgacttacatttgaagatttgcttgctgtcagttcaatgtaaaagccatgagtataccttaccttggggaaaactctttcctgataacaatatttcccttatcaggttgttctacttgcacactgtgatttgctccaaaatgccaaaatgcttttctttcctcataccatgtgcatttgaagataagaacagaagatgttaagagcaagtttagacgtgagcctaacaaagtttataagggtttcctcgacacaagaatctggctgtcacttcatcagagttggcctttcaccctcagttttaagatgtttcttttgagtattttgaaaatgtttgcacaattttgttttacatctgtctttatatcctttgctatatataattcattataaaccaattatggaccattttgtttagggacatcccctcgagacaatcacttttatcagtctgaaagctctttaattaaagaaaaaaaagattgattggttgttctggtttccagatgaagaatgtctacctttgtcaacatgcattagtttggtctttctcaaaacattcatttattattttacaaataaggacccagcataggagcagagatactaaatttcttccctgtttgattaagggatagatgctgggtggctttaataatttttagatggtgattgctaccaaagaggtgaggacccggtgtctgggggtagcaaaaggcctgttgaggatggagcccactaacatatcccaagagcagcctctgaataaactaaaagtatccaatggctataaatacagtagcatactctatactgtgaatgaatttctgcctggaacacatcagtcttcacttcaataccgaagtcattttaaacgaattaaaatgtttaggcaattggattatctgcatttttacttttcttatacaaataaagtccttgtagtttgtttagtttgggctttggcttttcagatacattaatttccaaagagttgattaaataataaagtgcaacttttctcataacttaaatggcagttatgagattaataatctcttatcaactaagatttgacaatatggtgttcaaaagcaaagttagaggaaaatgaaatacatggaaaatgatccatcccttcctctactgtaaaatgaatagatcagtttttaaaaaggggaaatatgtagtgattcctaaagtaaatcctagtaccactgtcaactgataattttaaatgtaatttagatttgtagatggtgtaacattaaagttgtataatgtttaaaaaaaaaaaaaaaggaaaatactggccgggcgcagtggctcacgcctgtaatcctagcactttgggaggccgaggccggtggatcacgaggtcaggagatcgagtccatcctggctaacatggtgaaaccccgtctctactaaaattacagaaaattagccgggcgtggtggcaggcgcctgtagtcccagctactggggagactgaggcaggagaatggcgtgaacccgagaggtggggcttgcagtgagccgagatggcaccactgcactccagtctgggccacagagcgagactgcgtctcaaaaagaaaaaaaaaaaagggaaaatatgttatacttaaactgactatatcctgaaaagttaaaaaaaaatctgaacctaaggctagtcaaccttttgtgacgctctttcctccgaaactgtagctgtcaatcggaagtgatttataaaactgcctcaaattcacatattacaaatgccaaacttttgcatgcatttggcaaggactaacttcacacagaactgggccagaaacagagtccctaaaagtttagggggtattttaaggtccaggtccaacaaaaaaatttacttaattacaatctttgtgccctacctttccactaagattcacaaatgcattgtgtcaagtgataaagaagaaaatgttacgaatcacctaacgtcatacatttaatttaaaatcaatgcaataatcttaaaaaaaattttatgctttttgttttggtttggtgaaatgacagtcataatgaacggttggatgcttaacataagattcatttcaagcatggatatgaaaaaagcacgcattcaaatattgtttataggttcttcaggttatgacatttttgttaattcttgccaatattagtacattaataccaaaatattaaataacttgtaaaattctagtttatgtaaaaatgttattttacaggtaacaaaatttcttcaggaaattaattgatttgttgtttataacatgacattgaaattgcaaacccttgtggcatcaaatttgtttgcatgaaaaattagtactaatattttgtatagtctttataactcatgattttgagatttccaagtatttccaagtacagaaagtacaaaaaaattgtatagtaaatcgaatctgtggagagaatctgtcaatttgttaaattagctgcctctttctttccttccttccttccttccttccttccctcccaccctctcttctttcttttttttttttttttttttgacacagtcttgctctgtctccaggctggagtgtagtggcgtcatctcggctcactgcaacctcggcctccagggttcaacaagggattcccctgcctcagcctcctgagtgactgggactacatgcgtgtgccaccacgcccagcaaattttttgtattttagcagagaaggggtttcaccatgttggccaggatggtctcaatctcttaacctcgtgatctgcctgcctcggcccctcaaagtgctgggattacaggcttgagccaccgcacctggcctctttttatttgtcatggtgcatttgggacagttgcatatgttatgatataatcaattcatttctcatgtatatgcataaaccacccacaaatgtgtttcatttcttaaacagaaggatacttaagattttgtgctaatttggcatgtgttggtgctacaacagtccaaggaatgcagtaggcaattagcagcaaaatatgcctgataaaaaacactcactttcttattgatatagtaggggtccaggtcctccaggggctctgacaccatctctggaggaatgtctccataaataaatggaaggttctttccagcttccaagtcactatttggctttgggccattttcgtcgtcatcttttttgtctggtttgggattctttgccttttcttctgcaatgcgtctttcaatagccgcaagagattctctggtgaagaagttgaagctgtcaggtcctggtggtacaagcactgtttgctccatcttgtcatcctgcacattttaattaccatttattctgcatatgaaattcctaaaataaaaggaatacagatattttaaagagtggactaagagatgttaatataaataaattcttgtcatgaaacatgagctagaggatttaaagtctgttttctccttaaattgaaaggtgatttctaaagaaaaaattttaacacaaatggtttctgtgttgagtttagttaagcatcacttatttattaattcttgtgctttactgatacaggaactgtgccatgagttttaaaagtggttcaaatatggccttaatcaaagtacattaggctaattaacactatatcactaatgagttattcagtctgtgacacacccagaagatggagactgtgcgtataaaggcaaaggatagctcatttaacaaggatgaggggaaaaggaattgtctctgagaggacataaaatctaaccctctaggtctgacaagtgattcctggccaagatagtcaggatagtttgcagtgaccaaccttaatgaccaatcaaatagttattgctgtcttgactgggctttaacctcttctaagatttgagacaactggaactatgtcctgctcacttcactagccatgcatggttggcttacttgaacacataaagataaagacagtccacggttggacaaatgtcatttatgtgagtaagaaggagaggaaaactaggctgtaaagaaattgctagatggaggtgggggtggaagaagatagctgtaggtgcaggagacagcaggagtctcctgtttcaagaaaaatgatcagaaagaagtcagggtgccataaactcaatagaaactaagtgtttttcttcactgaagcaataatgaaattcttgctgattctatagtcctatagtgctaaccatattatgaaggcctgaggcaaaaccgtcaaccccatacagcagagtcagacctgatctgatgccagacgccaaatcccaaatgtattgttttaaggcatatttaatatgagctcagatttcacagatattactgagccaaaatattccagagcctaagctgccacttggccatgaattttatttggagactgcattaactcattaaggtcagcaagctatggtacagttaattatagctttggtgtatatgaactacaataagaaaattgcaggcataattattttgtgagggacagagacctcaaatttcaaggaggttctcattgttgtgaggtttataaccatatttttcagagtggatgatcaaaagaagggaggactcaagtttaaatttgtacccttagtctactaagtgaagttttcagcggttcttagaacttaacctgcagttatttagtacctgcaagaataggttgtctgtaaatcaatgaaaactgaatgttctgtctacaaactctggttcccctacaaggcatcaggaaaatactaacatttattttttgcaaataaaagtttagggataacaaatatagtaacttttctcaaaagggaaataaaatattctgatgtatatatatagtttttatttttaaatagctttttgatagaaaatatatgtaaatgatataaatgcaaatatctaaaagaaaatgcagtataatatctcctttttaccttgtttccccaggcccagttccccttcctagaggcaactactactacttatctcccatatatatttccaggtattcaataggtatatgctagaacatgagtgtatgtatacatattctattttaaaatacatattcaaatggaatcttattatacaaactgttttacaccagcattttttacttaaaatgtatattagagttcatttatcttaatttttatagatttgactcgtacctattactggctacatgggtttccattgcatgttatgtgccataatttatttaaccaattccctgaatgtgagtatttgggttgtttccaatctttagctaatattgaataaagttgcaagtaatacatttttacacacatactttcaaatatatgtggatatatttataaaattaatttttaaaggtagacttggctttgtacagaatgtttatttatgatagttactgcaaaactactttctatggagtttgtatgaacttattctcctgacagcaatgtaacagagtgcctatttatcctcaccaatataatatgttatcatatttttgatatttccaatctgacagggacaaagatgagagcatattataattttaatttgcatttgtcttactatgagaaaagtggaatatatttttcttatacttaagaattattttttattttctttcctgcaactgcttatttaaaaacagcccattttttccttctatttttttcaatctatagcatcttttaagacaaaatattagccacttgattttttgatgtgtggtcttttaaaaatgtatattttttgactttatggtgctttgtgctacagattttaaaagatttaattaaaaatgttaaaattgttaggtgattatctaattcttctttggcttctggatactgtataatgcttagaaaggcatccagagagatgggcagtaaggggtaggaaaaaggatataaaatatatacatacacacacatgcatctgtatcacctttccctcttgtatttttagtattttggtggtttaatgttataagtttaaatattttatctatttggaatttattttctatatggagtgaggtagagatcaaagaacaactaaataaatgcagagacagtccatgtctttgaataggagtgttcaatatatcaaagacactagttcttcccaacttgaactaaaggtttaatttaatttctgtcaaaatcccagcagttatttgtggatattgataaactgattttgaagtttatttggaaaggcaaaaaacccaaaagagccaacacaatgttgaagaagaacaaagttggaggactgacactaacccaactttaagacttactgtaaagctgcagtaatcaatacagtgtggtactgacaaaagaatagataagtggatcaatggaataggatagtgagtgtggaagaaggcccacataattacagccaactgatctgtaataaagaagcaaggtaataaaatgaagaaaagatagtcttttcaacatgtattgctggaataactagacatccaaatgcaaaaaaaaaaaatgaacctagaccttatgcctttcacaaaaaataattcaaaatggatcacaaatctaaatgtaaaatgcagaactaaaaaactactagaagataatattggagaaaacctagttgactaaatttgttgataactttttagttctctgtttttcttggaactgtctcatcttcatatttgagttctggaatatttctggtgatattctcagtgctatatatttgtttttggttttctaggagtgatggtgaggaggaattgtgccagcttgcttcttcactgccattttggaaccagaactcaggtgatgactttttagatataacaccaaaggcacgatccatgaaaaaaaagaattgacaatctgatatcattaaaatgaaaaattttgctctgtgaaagatactatcaagagaataggaaggcaagccacatactaagaaaaatatttgcaaaagacatgtctgataaaggactgttaccccaaacatgcaaaaaattattaaagctcaacaataagaaaatgaacaatctgaataaaaaatgggccaaagacctgaacagacacttcaccaaagaagacacacagatggcaaataagcatatgagaagaagatgccccacatccatcatatgtcattagtgaaatgcaaattaaaacaataagatagcactacaccctcattagaatggtcgaagtccagaacactaacaacattaaatgctgatgaggatatggagcaatagaagctcacattcattgctggtgggcaagcaaaatggtacagcaacttggaagacagtttagcagtttcttaaaaaccaaacatactcttaccatatgatccagcaattgcataccttaggatttaaccaaaggagttgaaaacttatgtccacacaaaatcctgcacacggatgtatacagcagccttattcataattgcccaaacctggaagcaaccaagatgtccttcagtaggtgaatggataaataacctgtggtacatccagacaatggaatattactcagcattaaaggaaatgagctatcaagccatgaaaagacatggagaaactttaaatacatattactaattgaaagaagcaatctaaaatggacatacagtatgattccaactatatgacattatggaaaagacaaaactacagagacaataaaaagatcagtgattgccagggcagtgaaaatactttgcatgacactgtaatagtggacacatgtcattatacatttgtgcaaacccatagaatgtacaataccaagattgaattataatgtaaactatggactttgggtgattatgatatatcaaattgggttcatcagttgtaactatatacaatacctaaacactgtctctaaaatagctcttgaatcaaagaggactttgattctaatacatataatatagcacatatgttaaaatatacctatatacaatacaggtatatttgaactgcgtttaatttgttaatttagggaaaaaattaatttttttcctaaattaattttcttccattgtattttttctcttctaaatagattatttttacagtaatacatatgtgctactctggtgcgagatattgatagttgggggaggctctgcgtgtgtagagaaaggggaaactctatatttttggcttaattttgctgtgaatctaaaactactgtaaaactagtctatttcaaagagaaaaagtacaatggaagaaatgtttctaaatacaatgtaagcattttttaaaagctttgaataaaccaaaagtaaatataaatggatggaaagttatatcctattattagataggaatgctatatcataaagatattaattttccctaaattaataaattaaatgcagcctttgaaaaataatcacaaaattcatataactagagaaatctatttgagacttcatgtggaaaaataagcaaacaagaataaccagaaaattcttaaaatgaattttggtttcaaagtcctcactgatgcaagaactatttaaaagaaagtgtttaaatttttcaaatgatagattttccttctaagttttaaatttatgtttagttttattaccctatgctctgataatgtagttcgtaccatttctgtttcttggaatttattgtgatttatttttatcctaatagaggttgtttttaaaatgacttttctaagaacattaaaaagaaacttattctttattttaaagcagtagagttcattatgcctcaattatattgatcttatttcttatcttatgtagaccttctatgtctgtacatattttttttctacttgactgttccaagttgggagaggcaaattaatgtctatttaatgtgtttttatttattgtggtttctgtcatttttgttctatgaattccaatgcggtattgtttgatgtgtagataacacttatgatcagatctttggagtgaattgaaccctgtacttccttaaatggcccttgtttatcttactgtagtttcttccctttaaagacaactttgtctcatagcatataatgactttaatttctacttatttgcacttatctagtatgtctttttccatcaattcggtttcatccttttcattttactgttttagcactttccttaatatgtatatgtttagatatcatatataggtatattttaacatatgtgatcattacgacaatcaccgtctttcagagtgccacacttgatgttattgtccatgaagttgtgtgaatggacagaaacagttactaaaagccttcctattctccagaaatactgcatttgagaaaagctctctaaagaaaatctccctggtcactagctatcatttactggagaaataaacaaccaagaaagtagaagacatgaattctacactgacaaatatgatcagttcaaacgtattatatataattataaattagttagatacaggaattatattcatatgtaagcaatataacccatattataatgaaatcatactgatactagaaaaagtatttttttaactctaagtagatcttctattcaaatgctacctaaaaataaattatgttatattaattataagaataaaactcattaaaaatctcataaggttaattatgaaatacctaaaaaactgtcagatgtcattcaatattaatattttttagtaatatgaaaaattgttctaaattacatttgaaatctgtacttattctattaaaatacagaaataaatcatgaattttccatttacacttacaaaggagatttcacctctttattctaaaaatttataacagaagacttaattgtcctaatttatgaaaatacatgtcactagatacggggtagtaacctcatagaatctgcagttttggcttacagctttctcttttcataaaaaccagcatttaaatatttggttacatagaggagaccttgctcctttcaaaagaggtaagacaatgaaactttcctaacaagagaagacttcaaagagagaggccttttcaagatgattatggttatgcatttggacaaaataaaattaagaagagaactaagaaaccatagctaggaagaaaaagtaacaaagtgcatgttagcaaacttcaaatctgaaggaattttaaaaaatattggaaataagtagagtagtgggcaatagaaaactggaagaagaatgattctttggaagacaagaaaaatacattaaaagtggaattcaattagataagcaatcctaaagaagacaggaaaaaaataatccaaaagaacatgaaatggaagtgagagatcatgggggaaaaaaaagattgtaagaaaatgaagtggaaattttgagtggaaagaaatagtaaagtaatagcaataacatgaccaatatcaaataacgtggacaaaagaattataaggaaaaatttgttagaatatacaaataataaataaagatataatatcatctggtaatatctaactgaaagaaaaagagggaggtaaatctgtagcattataattaacagattaccttctcgggagactttacaagatcagaaagttaatactgataatattcagtgtcatttctaagactttactaattcattacttatcataaatgttctagtactagatgaggtttttgcttctgggcattatatatctctgtttcccgtagaagaggacacatgtattacgttctggacttgaggaggcatttatcacagccaaaagatgtttatacttgaggtgactgggagtggtaaaccatatggctttggtgaccctcaaagtgcagatggaggagctttatttaaagtaatcctaacccatgaagccttacagttaaactcccttgggcatctgcttttctccagtcaaacaaatatgtacgatagctcacaatgaagtatttcattttccctgtggcatttcacacagaagtcttaactgtaaaggcaaccttataaatgctttgtacccgaagaaactggccttttataagtaaatcattatgtagtttcttcctttggagggcagctctgtgtgactgcttgggcctctgtggttagatctgtttggttaacgggcttttgggctttcacacaaagctatactctccacaaacttctgtgagataaaaaggtgatatctgtcttagtcctctgaatattttttctttgttcagaacctgagaaagatgaatgaaatttagtgtttcccatccccgagagacacccagcatccacaacttcacactctgatgccattgtgtatttatgcaagaaataccataactaaggtaatgtcttgagattttttggttcaataatgtccttaaattctatgttgtttttaaagcctaaaagaaattccccctcctcactcccccgtctctccctacaacctggtgagacaattctctcattttctcctcccagtttccaatgctattgttatgatctattagaataattgctattatttttttgccttatctgaccctagaagtgatttacagggaaaaaaattactaaccaattgattagtgaactgaatataaagtgcagctcttatggtttattcacagacaagaatatatatagtacttaatgtgatagtattttgttgttgatgtggaacagtgttagtctataatacaggctttcaggcagacaagacctagtttaccttgacctctggacttctgaaaggttgagtaagttattttaagagaattagacaaagataagtaaatcaaaaccaataaatggcaaagatttaaaaaacagagattagtctattcctctcatttaatagaaaacaaactgaatcaaagaaaaatgggcaatttctttgtttagaacttatgtgcttcctactttcaaaataaatatgtcatttgtcccaggttacgcagcttattaatggtgggacttaaatcagaacttttattttctaactcccaaaccagtgtctgccaggtcctaatagttatgaaatattcttttaaagctaaataaaatatatgaaaatataagtagctgtgttaaaatagtatttatctactctaattgatctaggtctctccaaggaatttatattacttggacagacccaaaacaaatacagtaaataaagcattctggcaaaaatggagacttcaaaattttgaaaaatgggagactccaaaatttaaaaagatgattgtaatattcaagtttagaatcatatgatgcaggttttaatcctgctgaactatacctccaccgtcaatttatgttttacttccgttatgttttatgtattgctaaactggattatttctagttactaactgagcagatgactttatataatttatctgtaactccaaagttcaatatagttgtgcaacatttatatatcttcaccaccttataatatataatctgatgtggagaaaaattatatatcttcaattctgtctataaagtagtttaatatccatactgaagagaaaccaaaaagacttctgccaaaatgcttgccatctccttgtaaagagctattactattctggggacataaaccatctgggcacgacaatttgtgaagtgtttcagttcgttttgtagtgttcttgccacctactttacaaaagaatgttactgccaataataataaaaataactaggtaaaatgttattcttactgttgtgatctcacataactattttttagcagccaagaaagaaattggtttttacatagaaatcccaaacctagaaagtattgttttataaatttcttttctagaaataatttgatttggtgtaattataattacaaaaatatttcatttgatttctcaataagccaatttttagtaggttggggttaactaaaacaacatatttcagccatatgtttaaaacttttacatttaaaaataacttcattatctacccttagtttttcatgccttatgcaaactgcagttaaaataaggtcagatatctaacatatgtctgtatctacatttgtatactccaggggtgtttttcaagacaccctaataataaactaagaagtaaaaaattcattcaatctacatacaatacatagaaatacaatacatagtttttgcctgagattcagatctcaggcaaaaaattcattcaatctacatacaatacatagaaatacagtacatagtttttgcctgagattcagatctgccatagtttattaggctctgcctgtagttttctcatgaaacacatcagtatcattaggatgattaatttcatttttttccttacagagaagattgtcattaaagagtaagaccatggatagttcacataataaatcatgtgaaatttaggatctcttctagacgatcatagtcagaataatttaagggaattcctttgaacaaatgtcattagtttatatcaagaatatagtaatgactgtcattgtaagtaaattatttaagttaacctcttttagtaaagttttcctgttagaaaataagtaatcttattgtgtgggtgagtggtcactcgacagagatttgggaggatgtagagagtgaagtctaatcctcgtgactgtgattgtggttgcagattttgagataccaagtgtgaggtgataggcacttaaagcccagtgtgggcctcccagggctgtttagctagcaatgagagaggcactgcctatatccaagttgtatatggcaggttttgcacaaagtggattactcgaagagaaagcctaatggccagtctattcatcttcccctttctcgatgttcatcttttctctcccagctctcctttattctcaattttctttttttttttttttttgctcagcctccatctcacttccgttgctgtcctctccccaccccttcccactctggactgtgcctctcctttgtagacacttcaagtccattctatttcattcaaaaaccatggtctagaagtaacttaatgtaaacccacaaagatggagacagaatgaatgccattcttcttgctgctctctcagacaatgcaggtcatttttgcctatggtgctggtaaagccaggagttatgtagctataagtagcagccagaggaaatagtgcctgagtcagcaattgtctttttattgctgtggggcaataatgggagaaaaaatcaggcttggtacaattccctttgaaggaaaaagatgccaacactagcattttaacacaaaatgctggttgggggttgggaggaaggatgcttacattccttctttggaaatatctactttgataaccattttggtaaaataatgcagtgttttcagtgtgcaaatcctttcaggactcatggttgtatggcagacgcacctgacagcaataatttaagggtaccctgagaatgactctgtggtctaaaaagaatgtgtgtttggaagtctgaggtaagaaatctggctggaagtggccaacctggaaatttgctccttattattaaggatttccaaagcctggtccattcctcagaatgtgggccatacagtggatgaagccctttgtttggattaaatgaatgttgctaggtggagagtgctaagtgaaaatgctatataaactgcatgctttttacaaacattagtggttctcccatccagcccactgccactggaccacccctgtatatgagtcctagataaatcctatgtctcccttgctggcttcaagtctcttctttagtctcttggccatgatgccatccctattggactcaatggtgttccagcacaacaatggtatgattagactctgttcctgggagacatacaataccctcctttggtaggatctatgtggaatgtttagtcattagtgttattaagaaatcatagttatttaatttatgttttaagactttcacctttcattctctgaatgttagttagctcagggtgtgaaatggttcaacagaaatacttgagctgctgcagccagaaggatgtttatggtgttatgcaggaaatatcctgcagaattctgtgtggaattctgctcagaggggtttctctttagcataaactcaatttaaaaatactcttctgctcaaaagcattcttatgaaaccacctcaacacaaagcaaaactgtccaggcatagttgctgtatggagagatacagcatagaacccacgggcagcggggctgaagcagagaaaaactgcaggggaaagagaaacagatccaggaacggggagaggagagtgttgagcacaaattaactaccctggggaatgagtatcaggtgtttgacactttcacttttccaaataacctgaagacaaatggaacctccctgagttatgaaaaattgagactagaagtatcagagctgcagaattcatttggttcagattctgtatatataaaatctagacatagaacaagtctaagcaaaggcatattatctgcaatggttactatggattattgttcagagaagaaccattttggtatagagaaagctgaaagaacttacagaaaataggtcttgaaagatgaaaggcagagataatttcctgattcagaaactcagtatattaaattttctgtatgttatttatcatttatgatataaaattatgcttaatttatcatgtaaactgaaaataaaattctaagccccctgactgaattgaccttctcctggccaaaaggatcccagagtaaccttgaagactgaattctcagccatggtggatcagggagtcagacatacctccttataacccctccctcactaaccactatgaggctttcttccctaagggctaaacagaaatcagccctttcaaaagactcccccactgacatggaccaaccacctgacactttccctccattggtgcctcataagagaccacccactagggaatgattctagccattccactgagaatgtgcagtaaggatttttgtgtcctctgcttcaccttttaatgtcagagggccgaaaactctaccctcggatcatgctaatgtcgccattttttccacatggatcccacaaaggggcatgaagctcagttgaggatgtgcatgcttctcctctcataaatattcatgactcctcctataacttattgaacatatatatttggccaccgtgcttagcataaatttctgtttcctttttccctcccttgaagtgtctgtttctggcttctggctggaagttatgcttcccaacctgtcagaaggtcactctgcaggctgcagccctttataagaaataaagctctcctttccaaatttatgaacctcatcattcttcaggtgataatcatataaacgtctacttaagtttgctttcagtctgtcatgtgaattcagtcattctcactatattccttttgtggtatactggtctgggttaaagagaccctctagggattattatacagtttcgtcttgtttgagagctcagcagctgatgattatcacagatttgtatagagtggacactaccagatgtccagcacatctgtcacagcagatgtgacattgagccaagtctatttctgtctaggtgtatgatacttggtgctatactttggatatggtttgtcgccatcaaatctcatgttgaaatttgattcctaatgttggaggtggggcctaatgggaagtgtttgggtcatgggtggatccctcatgaatggtttttgcctcattctcactgtaacgagtgagtccttgctctgttagttctcatgagaactggttgaaaaaaaaaaaaaaagagcagcctggcacggtggctcacacctgtaatcccaggactttgggaggctgaggtgggtggatcacctgaggttgggagtttgagaccaggctaaccaacgtggagaaaccctgtctctactaaaaacacaaaattagctgggcatggtggtgcatgcctataatcccagctacttgggaggatgaggcaggagaatcgcttgaacctgggaagctgggagggagaggttgcggtgagccaagagcatgccattgcactctagcctgggcaacaagagcaaaactccatctcagaaaaaaagcctggcaccccaccctgtctcttgtttcctctctggccatgtggtctctaccccacacaggctgcccttgccttctgtcatgaggggaagtcacctgaggccctcaatagaagctgattctggtgccatgcttcttgtacagtctgaagaaccataagtcaagtaaacctctttttaaaaaaaaaaattacccagcctcagatattcttttatagcaatactaaatggactaagaaacatggtctatacagtcaattttgttcatttctttaatatttattgaatatagacaatgtgcaaggcactggttagagatgtggagactatgaagttggcaaatagagaataataatattgagaatcctgcaaagtaaccaaattgattttagaagctcctttatgaaatagactttaggctttagtcttcttggatctttacttggaaatttaggtattcctgattttaacagattcatttttttaagtcccagagtagaagaaaatggaggttgaacactgaaacattgactttgaaaactgaacatctctgtcaatcccacaatctgtgtgtttgtgtgtgtgtgtgtgtgtgtgtgtgtgtaagggtatgagctacaacacaatcttgaattgtcactaaaccatttttaaaataattggtcaaccacccatcacatcacttgtattcacaatcccataaagttatcagaccagagtgatttttctctaatctagatgtacattaaaatgtgcatctcatttaaagatagttttggtacatcaaagtgaatgttgataaacatgtaagacaatggaatataaagttcaatgcatgtcctgcattctctccatctaaccatttttgtggtgccaatgcctattttcaggtgtcaatgatgaagaactggaaaaagatatagttaaaacaaaaattgctaaagaaaaaaatgcatgcttttttggattcatttctactctttcatatcaatatgttttctaacatttcttaagtgctgagaaaattttcctttttgttatcctcaatagcaggtggcagctgaaattgttcaattatatgctttgttaaaaccttataaataatttaaatactattattacagtcagctaaagcctatgctcaaattatattttcttttgtttaaattcccaaatatatctcacctgctaccctacattcacccccagtaaagtcccaaagcccgtgggctaggtagggcattattgttttagaatgttaccaagttggcctagaagagtacttgatttgttgcgacaactgttgttgttctctaggtagagtgttgcgtaaaggaaacagtgatgtccaaaggggctggactggcagattggaagtagggagacccaaggtcagcattatgacatggaggatatgagtaaccaccataatgatttaagatatctgaacagggttgccagaaaaaatacatgccacacagttaaatttgaatttcagataactgatttcttaaagcataagcatacctcatacaatttgttttatatttactatactttaagttctgggatacacgtgcagaacttgcaggtttgttacataggtatacacgtgccttggtggtttgctgcacccatcaacctgtcatctacattgagtatttctcctatccctcccctaggcccccacccctcgataggccccagtgtgtgatattcccttccctgtgtccatgtgttctcattgtctatatttggggcccactgctagtaaacattattcattgtttatctgaaagtcaaatataactggacagtttgtatgtttagtttccaaatgtagcagccctatatatgaagaaagtcttctctgctaaaaaaattattttcctgcttcctgaaattcaattaattagcattttcagttcagttagcaagcgcttccttttaaaagacaagtatctctgggagtacatgagtcgtttatgcatcaatgagactacttacttctcaatgtaaaatgcatttctcactgtcaaagtgggttaatcaatcagagagagggcgtaagagttctttttttggttgactaggtaggggatggggctggctgggacctgttaatttcagtggaagaatacatatggatgaattacttttagtggggattttctgatggaatgaattatcaatgtgccaggaagagactatataaaaagatggaatgggggtagagagtgtaaggtggtactgacagaaaaaactcactcattctaggatttttcttgaacaattaaatactcatgagaggaaccagtgttgggttttatttttcaaacatggatgatggtaaatgttaaaaccagtggcaagcatattttcacatttctttcattattaaaagtattgatgtaagattatcctcaaatatatgagtagtgcatctttgcacattaaggactcctcctttattttatcacttcgctttaactccgtaggtcctatacaaaccaaagaaattatcttccttccttccttccttctttccttttttttttttttttttttttttttttgatatagggtattgccctgtcacacaggctggagtgcagtgatgagatcatggctcactgtagcctcaaacttctggccccgagtgatactcacacctcaggctcctgagtagctgggatgcataccagcatgcccagctgatttttaaactttcgtacaggcagtatctctctatgttgcccaggtggtcttgaactcctggcctcaagtgatcctcttgcctcagcctcccaaattgctgggatgacaggcatgagccattgtatccagcaagaaagagaaaagaatttaaacttctaaagatgaaactgctacacgtggacagccataacaacaaagagaagagtactcttaagcatttgtgaaagtcagaaacctataaacttttgggaaacaaaataagtatattttccctttaatcttacaagtgatgcaatacacttctagcaaaagtgaaagggcaaataggaattttgcaacattgagctctctttaagcagaagccaggccataggttcttcactagtcaccagggtctacagcctttattgtctttaccagtcactaggtatgagacattttctcataaaatgtaactactatacattcgccacaaactttaaacccccttttcacctcccatggtacccagaagagtgataggtacttaataggtcctcaaaaattttcagctaatgaataattgttaattaaaacttatactagaagcaaactcttaaaacatattctaagtactaaagtctaatattttatatctattggtttattcatattcttgtttgttaatcctaatcaaatagtgcaaagtttaaatttcattttcctaagatttgttttaaaataacacgatttacccaagtgatttcaaaccacaattacattctgtttaaattactaatattttattgcatcacaatctgcatgaaacagatgtcaggatataatgaactaacctgcattgtatttttatttttgtctcctgtggcataacgatttcataggaaagagaactacacagctgactgactgatggggaaagttacacaatggatagctttgcagcaacatactaatgcggtagggagatgctgcagagaggctagaaataaaatcatttctttccggagcagcactgcttgctgtcggctgagacaaaaaagagatttcctttttttcctttcttttttttgaaaactcacataacattaattctgttaagcactggatacacggaaaggtgtttaccttagaaaatcatttagcaatttttagaaactagacatatagcaattttaaatctttttaactatctaatgaccaaagcagagggtcctcacaagagggatttagatgctactgaattgaataaagaaaatatggatacatttattgtatgccttattcagtttgaggttcattttgagtttagaaatagggatataaaaacatcaggggttaaatagcatgggtaaaggacatgaaccaagctgcagagaagaggctgactgcctgctatatttgcaggcattactcagcacttttcttaaaccgatacatcttgctggctgcataagcaagacaagacccttttccctatggctcaggaaggcagagaagtcaacttcagccttgaaaaaggcaaatactttagtgcaataatgaaatcaactaaacgtcttgtgcttaatgtttctttccccacgccactagaattgtatgcataatcattctatgcaacatattgaagaaaccaaaatgtttgccacagtgtgctcagtaatttttttttgaatgaatgaataactgaattcatgatcaatgccttatcctaggtcacctgctcagtgcacgggctataggaagggcaaatgtcactgtccttcccacccatctcattctaacacaagtgttatcatcaaactaaggaaactaaaacatgtagccataaaacaactgtttagagcttcattcagataatatttttttctttaaaatccaagaatgtaataccaaattttaattaagcgaaggcgtctttgtggagaacttaaataatatggcatattgctttctgtttatctagtagagactacactttgaaaatatagaccattgcattcataaaaatcatgtggagatctttttgaaaacacatagtccaaggtcccacctcaagattttgtttcagagatctaaggtggacctagaatctgtgtttaaactgcttgtccaggtgatcaggatgtagcactcatagttaatgaatgggcaaattttgagaaacactgttttagagaatggtctaggaaaagcatccattacaaatataaaaaagcaagcttttggtacctaagggactgagtcgattcatgcaggtattggtttgttgattaaagatgcatccataattcaattaatttaaatgttagaacaggtcatatcttttgggtttatttttaattgtttcgtacagatgaggtctcgctatgttgcctaggctagtcttgaactcctggcctcaagtgatccttctgcctcagcatcgggagtcactgggattaaaggcatgagccaccatgctcaggtaggaaaaaatcatttcttacatggagatttattttctcaaccaggtaagttttgtgataagatcattaaacttagaataagaatagtcaggttcaaaatttggttgtagtccttaacaaaactgtgatattaaaatagtaccttggccttgcttagcttcaattctatcatttataaaatgggaataatttttataataacacatgataggtgccaactcagccctcactccttttttgaaattgtcctccatgtaacccatactgaaagtataaactatgtttataccatgtgactctttcacccctttcccatggccacagcttggtaggttttatgaggacgctgatcacggggcactcatctataggcttaactgaaacaatagaatttgctttctgggtgatgtttaaatgaagtaagagtgagtgagtcagaatgttatgagaagatgcactgcatgacctagagttgaggatgaggaagctatgtctggccatgaccaagcagaggatatcggccaaagcagaaaaaaaaaacagaaataacagtagccatgcaagcattcagaaagaatgtaggctgtgttgatatgtttctggacttctcattccagtttaatctctttatggcttacttgggttttggcctatgggattttcagttgaattcttctttttttttttcctttgagatggagtctcactctgtcgcccaggctggagtgcagtggcgtgatctgggctcactgcaagctccacctcccaggttcacgccattctcctgcctcaacctcctgagtagctgggactacagttgcctgccaccacgcccagctaatttttttatttttatttttagcagagatggggtttcaccgtgttagctaggatggtctcaacctcctgacctcacgatccacccgcctcggcctcccaaagtgctgggattacaggcgtgagccaccatgcatggcctgaattcttataataaataaaccattttacttatacccgcttaaatgtgcctttatgttttgaatacaagtgttctgacaaaagcacaatgtaaaaacactgaacataacatgttcttaacttttgttttaaaacaaaagaaaaaaatggaggttcagcaaagttaaatagcacaagttaataaagtgatgaccattgtcagacagtttggaggaagtttgagatttaaatccgggtctaatctttcacagttcaatgctcttgttttaaaaccagaaattcaggcagcaagactgatatttcattagaaacacttatgaccccaatatgttttcacattgagaaactgagtcattccactttttcatgaaaatagctaaaagaatccttatcggtcaaatctttcacacacacacacacacaaaaatgatctttaacattatttcaagtacttggacaaataccaagttgggataccagagatctatgttatgaaggatggataaaacatctgataagaaaaaaagaaagccattattattacaccttaaatattaaatgagaaaacaaggaatgacccttggagaacgactaattttgagaattgtatactgatagacgtgttggaatggactacttgcaaacagaatcactgagccacttaatgagttgagtggttgaaagtgtccttttaaatgatcaatttagaccccagagaatatctgccagacagaacaagttttagtgtagttgatagtaagttgtgcccagaatattaaattgagtcaaatttattttccacataaagtcacagttttatatgtcattatataatctcttggcagaaataaggaataacattctgaatgttgcactccaaaattcaaagaatcttagtataaaaatatctagcattttagatgtttcaaagtagggccaaatgcagaaaataagttggatatgataaaaataccagaaagttctattcagttggcatcttactagcagtttcatcttctaataatttagttgctacgcatggagtagaatagaatttaacaacaacaaaagatcattaaataccaatcaaccaaacaaccaaacaccaaaggacctattaaacttcaacgatgctcagttatactcttgagggtacagggctatcagagatgggcagtgtgctcctttcctgtgtagtctatgggatctatctatgtaaccctccatgtgctcctacccttccccttcagctgttaaaaacacaatgccaaaatcaggatcaaacaaaaattgcagttacacttctgaatttggcaacatctatttcaccactccttttagatcatttggtctttattattctgctttatattgtatttgattttgtaagtcagatcaaataatttttggaaatagaaaacaaacaaataagctccccattgctacagtttatacccattttaaatgatttatctttccatagggataaaaattcaattacgtaccctccttgtgacaaacctccatacaattgaaggcagttattatgtctctctttagttttctcttttccaagctgaaaaattttcaatattttaacccataggtatgatataattatttgtattcctcttttgctcccttctaatttctgcccaacttcactaatctccttagggtagaaactgtaatagaataatggtgataagaacagtaaaaagatgatgtctgatttttgtatacatttcccttagtacgaattactgtgtcaagttttttagtaatataatacctttatttagcctttgtcattgtacaagccagtttgacattttaacaaagggggattgaaacaataaaactgatctttaaatataaaaatatcccatgatcccatgattctcctgttcttcctgctatcaatcagaaacaacgatgcctgttaaataaaagagccttattggttctaccaaatttgtgactaattagcttctctgccatcctgttatttgtatagtttgttcttggttcaaaatatactacacgctaaccaaacttgacactagagtctcacttgccttgatgggccaattcctaaaggtttcaaggttattctgtttcctatttatacattcctcagagctattaatatcagtttcacttaaaatttatatttaatgtcaatacccagcatgaaaaactattaaatggtaatagtctttagattaatttagataaatggtaattaatatatttttccaggatgtcataaaatcatcattacttaccttgaaccacttgaaccctcccctaaaagcaatatgatacagatgaataattgcagaaaattaggcccagatttattctaaagttttcaagaattcataatgtcccactccagttttggattcatgttaaatacatgtcttacaaacattcacactatattctttttaaattatacaaatgtaagtatttaataaaatgcaaattctctcaaagagttattgactccacagaagacttttgagagtcaatgtctattgttactatcaactgacactgaaagttcaatttctttcattcatatggtagtccataattctgatatgaaagttggaaatcagggatgaaaaatcacttttttttttggttgttgttacagagtctcgctctgtcgcccaggctggagtgcagtggtgtgaattcggctcactgcaagctccgcctccctggttcaaacaattctctgcttcagcttcccgagtagctgggattacaggcacccaccaccacacccagctaatttttgtatttttagtagagacagggtttcaccatgttggccaggctggtcttgaactcctgacctcgtgatccacccacctcggcctcccaaagtgctgggattacaggcgtgagccactgcgcccagcctgagagatcatgttttttataagaacatatacatgtatagatatgcaaataccttcttaaagcacagataagtggtatccattatttttttcttgatcaacatgacattttgcttcaactcaaaagaaaattacattgatctgacaatttcttttcacaaggtcatagtaattttattctatgctattctaggtgactattaattttaatatatgtgtgactttttgttgtttttgttttgtttttattgaaatttgaagatactgagttaagatgaaagtcctaaagttcttcaatcacttttctgaaatctagacctccaaatttgccctttcataaagtttaccactagacttaacaaaacactctaagtgttcaccattagtgatgtaaatctaaaatactatatacttctttcttctttgtgtgtgttttttttgtttttgtttttgtgtttttggagacggggtcaggctctgttgcccgggctgtagtgcagtggcatgatcgcggctcactgcaacctaactctcccaggttcaagcaattctcctggcttagcctcccaagtagctgggactacaggtgcatgccaccacacctggctaattttttgtattttagtagacacagggttccaccatgtcacccaggctggtcttgaactcgtgagctcaagcaatctgcccgccttggccttccaatgttttcttttttaacaatttacaaatgtacagtgattacacttcgtttctatttttgaaacttttttcaccttccttcctagaaggggaaacctattaatagttctagaaatctcaatgcctacctcatcctttagtctttattaatttgttttttctaaatgccagggtttgaaaatcagataaacaccatctctagagatctgctatatgtttaaaaaaatgcttatacgtgagattatctagacttcactttgaaataagagatataaaattatatttggtatgttcaaaggtacttgtattcaattaaaaaaaaatagggtcttgccctgtcacccaggctggcgtgcagtggcatgatcatagctcactgcagccttgaactactgggctcaagtgatcccttcctcagcctcctcagtagcttggagtacagatgtgtatcacctgaccagctaatttttaaaaatattttgtagggacagggtctcactttgctgcctaggtggatcttgaactactagcttcaagcaatccttccaccttggtctcccaaatttctgggattacaggcatgagctatcacacctagcctctatttgaagttgtattctagagtcttgtagaattagaaaacttttatctagataaatagaggtcattgtagaaatatttgtatgcaatctgccttgtttggatgaagttttcttctcttgcatttgtaacaattcacaagaaatatctatctgtctatcaaaatctggcagagacacaatgaaaaaagaaaactttaagctaacatccctgatgaatatagacacaaaaatcctcaacaaaatactagcaaattgaacccagcagcacatccaaaaagctaatccaccatgatcaagtaggctttattcctaggatgcaaggttggttcaacatatacatatcaatagatgtgattcatcacataaacagaactaaaaacaaaaaaccacatgatcatcttaattaagatgcggaaaaggctttcaataaaattcaacatctcttcatgttaaaaaccctcaacaaattaggccaaagcataagagccatctataaccaactcacagccaacatcatactgaggaggcaaaagatgaaagcattctccctaagaactgaaacgaaacaagggtgctcactcttaccactcctactcaacataatgctggaagtcctagccagagcaaccaggcaggagaaagaaataaaaggcatccaaatacgaagagaggaagtcaaactatctctctttgaaaatgatatgattttatacctagaaaacaaaaccccacagtctcttcccaaaggctcctagatcaaataaacaacttcaggaaagtttcaggatgaaaaattaatgtacaaaaatcagtagcatttccatacaccaataacatccaagctgagagccaagtcaataatgcaatctcattcacgatagccacgaaaagtataaaatacctagtaacacagctaaccagggagatgaaagatctctacaacaagaattatgaaacactgatgaaagaaatcagagatggcacacacaaatagaaaaacattccatgctcatgggtaggaagaattaatattgttaaaatgactatgccacccaaagcaatttacagattcaatgctatttctatcaaactaccaatgtcatttttcacagaattagaaaaactatttgaaaattcatataaaacccaaaaagatcctgactagccaaagcaatcctaaacaaaaagaacaatgtctgaggcatcacaccacccaactataatacaagtctacagtaaccaaaacagcatagtactggcacaaaaacagcttatccaccacaatcaagtgggcttcatccctgggatgcaaggctggttcaatatacgcaaatcaataaatgtaatccagcatataaacagagccaaagacaaaaaccacatgattatctcaatagatgcagaaaaagcctttgacaaaattcaacaacccttcatgctaaaaactctcaataaattaggtattgatgggacgtatctcaaaataataagagctatctatgacaaacccacagccaatatcatactgaatgggcaaaaactggaagcattccctttgaaaacgggcacaaggcagggatgccctctctcaccactcctattcaacatagtgttggaagttctggccagggcaattaggcaggagaaggaaataaagggtattcaattaggaaaagaggaagtcaaattgtccctgtttgcagacgacatgattgtatatctagaaaaccccattgtctcagcccaaaatctccttaagctgataagcaacttcagcaaagtctcaggatacaaaatcaatgtacaaaaatcacaagcattcttatacaccaacaacagacaaacagagagccaaatcatgagtgaactcccattcacaattgcttcaaagagaataaaatacctaggaatccaacttacaagggatgtgaaggacctcttcaaggagaactacaaaccactgctcaaggaaataaaagaggatacaaacaaatggaagaacattccatgctcatgggtgggaagaatcaatatcgtgaaaatggccatactgcccaaggtaatttacagattcaatgccatccccatcaagctaccaatgcctttcttcacagaattggaaaaaactactttaaagttcatatggaaccaaaaaagagcccgcatcgccaaggcaatcctaagccaaaagaacaaagctggaggcatcacactacctgacttcaaactatactacaaggctacagtaacccaaacagcatggtactggtaccaaaacagagatatagatcaatggaacagaacagagccctcagaaataacgccacatatctacaaccatctgatctttgacaaacctgagaaaaacaagcaatggggaaaggattccctatttaataaatggtgctgggaaaactggctagccatatgtagaaagctgaaactggatcccttccttacaccttatacaaaaatcaattcaagatggattaaagatttaaacgttagacctaaaaccataaaaaccctagaagaaaacctaggcattaccattcaggacataggcatgggcaaggacctcatgtccaaaacaccaaaagcaatggcaacaaaagacaaaattgacaaatgggatctaattaaactaaagagcttctgcacagcaaaagaactaccatcagagtgaacaggcaacctacaaaatgggagaaaattttcacaacctactcatctgacaaagggctaatatccagaatctacaatgaactcaaacaaatttacaagaaaaaaacaaccccatcaaaaagtgggcaaaggacatgaacagacacttctcaaaagaagacatttatgcagccaaaaaacacatgaaaaaatgctcatcatcactggccatcagagaaatgcaaatcaaaaccacaatgagataccatctcacaccagttagaatggcaatcattaaaaagtcaggaaacaacaggtgctggagaggatgtggagaaataggaacacttttacactgttggtgggactgtaaactagttcaaccattgtggaagtcagtgtggcgattcctcagggatctagaactagaaataccatttgacccagccatcccattactgggtatatacccaaaggactataaatcatgctgctataaagacacatgcacacgtatgtttattgcggcattattcacaatagcaaagacttggaaccaacccaaatgtccaacaatgatagactggattaagaaaatgtggcacatatacactatggaatactatgcagccataaaaaatgatgagttcatgtcctttgtagggacatggatgcaattggaaatcatcattctctgtaaactatcgcaagaacaaaaaaccaaacaccgcatattctcactcataggtgggaattgaacaatgagatcacatggacacaggaaggggaatatcacactctggggactgtggtggggtggggggaggggggagggatagcattgggagatatacctaatgctggatgacgagttagtgggtgcagcgcaccagcatggcacatgtatacatatgtaactaacctgcacaatgtgcacatgtaccctaaaacttaaagtataattaaaaaaaaaaaaaaacagacacatagaccaatgaaacagaagagagaacccagaaataaagtcacacacatacgacgttctgatcttgaacacaatcgataatagcaagcaaggcagaaaagactccctgttaaataaactgtgctgggataactggctaaccatacgcagaagattgaaactggaccccttcctttcaccatatacaaaaatcagttcaagatggattaaagacttaaatgtaagacctaaaactctaaaccctagaagaaaactaagaaatacctcgattaaggccttggcaaagatttcatgacaaagtctccaaaagcaattgcaacaaaaccaaaaatagacaagtgggacctaattaaaataaagagcatctgcacaacaaaaacaaaactatcaatagagtaaacagacaaccagcagaatgggagaaaatatttgcaaaccatgcatatgatgaaggtctaatatccagtatctataaggaacttacataaatcaacaagtgaaaaacaaccccatttaaaaatgggcaaagaattaaaaagacagttctcaaaagaatacatacacgtgaccaacaagcatatgaaaaaatgctcaacatcatgaatcattagagaaatgaaaatcaaaaccacaatgagataccatctcacaccagtcagaatgacaatttttaaaaagtcatgggcggggcgcggtgactcgcgcctgcaatcccagcactttgggaggttgaggcgggcggatcacgaggtcaggatatcgagaccatcctgactaacacggtgaaaccccatttctactaaaaatacaaaaaattagccgggtgtggtggtgggcgcctgtagtcccagctactcaggaggctgaggcaggagaatggcgtgaacccaggaggcggagcttggagtgagccgagatcgctccacagcactccattccagcctgggcgacagagtaagattacatctcaaaaaaaaaaaaaagaaaaaaaagaaaaaaaaaaagtcagaaaataacagatgttggcaaggttgtggggaaaagggaacacttatacactggtggtgagaatggatattagttcagccactgtggaaggcagtttgaagatttctcagaataaatgaaaacagaactaccatttgacccagcaatcccaatactgggtatatatccaaaggactataaatcattctaccaaaaagacacatgcacgcatatgttcattgcagcactattcacaatagcaatggcatgcaatcaacctagatgtccattaatggctgactggataaagaaaatgtggtacatatatgctagggaacattacacagccataaataagaacaaaagcatgtcctttgaagcaacatgggtgcttcagagaaaataccattcaacaaagtttcagtaatattcgagctattttgtggataatgcacaacttttgtaccttaaggcattgttcaattctgtttaagaataaattgtttttgagctgcctattagatttcaagcctgactttagatttgggagatatatatatatatatatgacggtttctgttctagaggagcagacagtctgttaggccagacacagttgaatagcaatatattataatattgaggaagtaggctgggcgcggtggctcacgcctgtaatcccagcactttgggaagccaaggagggcggatcacctgaggccaggagctcaagaccagtctggccaacatggcaaaacctggtctttactgaaaacacaaaatttagccgggcatggtggcaggcacctgtggtcccagctactcgggagactgaggcaggagaatcacttgaacccgggaggtggaggttgcagtgagccgagttcgcaccgctgcactccagcctgggtgacaaagcaagactctgtcttaaataaataaataaataaataaataaataaataaataaataaatactgaggaagtataacaataagttatctttgagacacggaggaagcacagaagaggatataatcacttcttttgggatatgaggagggggaaaaatgttaagagaagcttcctaagtaggtgagagctgaaatgggttttgtaaaataaaaggaaattcaccaggaagataaaggtaaaggactgaggacatgtgaggcatgtaaaattaatatgatcttttagtcacttagaaaaaataccataaagaacactaatagtgtttaaaagcatctacccagtgccaagaactgcattatgtattggtgaacataactttagactttaccatacaacgtgaaaatatatattattatcactattttacagatgaagcaataaaagtcagaaaaaatgtagctaattaaagtgatactgtgtatagctagagcagtgtatagctagagctgatttgtctgactctagccctagtttctttccattatatcaatttcctggaaatgtatctctgttcatggcatagtgcctgacactatgcttattaatatcttttgaataaaagaaccactgagtgatttgaaataaaactaaatttagttagttaattttattggtggtatatagagatagtaggaaaaataattgaaaagagacataaacagatttgccaatactttctaagaaaaattatggaactagagtttagtcaaaatgaatgctttcattgttagaattcaactttaatctttgcagaatacaaacaaagacccattttctagaagaagtaacagggaagagagagtaagaaagagataatgatgaacattgtctaatgttacagcataatctagtaaggtaagaacagaagagagttcattgacttaccaacatagttgtccctaatcacctctgtgaacctagagtgctacgatataataatgattgtggtggtttaaaaagtaaatggggctgggcatggtggctcacatctgtaatcccatcactttggaaggctgaggcaggtgtattgcttgagctcacaagctcgacaccagcctgggcaacatggcaaaaccccgtctctacaaaaaatacaaaaattaaccaggcatggtggtgcgtttgtgtagttccagctacttggaaggctgaggtggggggattgcttgagcctgggaagtggaggctgcatgagccaaggtggcaccactgcactccaacctgcgtgacagagccagatcttgtctcaaaaaaataaaaaaattaaggtacattttatatatgagactatgagaccgccaaatgatatttctcagccaacagccttcacagacatttgtcttagagccgatttggctactttgtgttgccagtatgctgttgtaagaaagcacaggaatgcttgtaaagaagaaaagaattggtatcatggtcctgaaaaaagttatttcctcaaggaataaaaatagcaaaagaaatgacgtaatttctcagcttctgatatgtttcaaataacctcagtgaagtcctaggggaaatagcttatatcatatgtcttactccttaggatttttgctatagaggaaaaagtgtgaagttttcttaatttaatgttttatacatatttgcttgctgtacctggaccttacaaagtggatactctttagaaagtgatgaatattttcacttttaaaaggtttcagagtttaaaaaggttaaaaagaatcattcataaaagtttaaaaacaacttcatcaagggtttcccttttgccaagttataagtttaaaatgagagaatgaatttggttattaacagggttaccaccaggcctgaatgtaaattaaacctttgccaatagaagtgaaacagaaagaatcaaccaacaattttatgaattacagacctcatacacattaaaacttctacatatgtagttatgcttcagtgaaaccctttacattgtagttatgcttcagtgaaaccctttatattaaaataatcatcacgtatttgaccatatgaaaatagtttacatctaccacatttggtttatcttggccaaaaacaattaatccttagaaaatctactatatgaataactcaataataatcaaagcatttgaattagaaataggatcaaacacacttttttgaatgaatgcctaatttttatttctcagtggaaatgctagagcatatccaatattcactagtgaaaaaggctattttccatgaagcccatgagaagatgacataagttaaacttgtccaattccttttcagggatagcatcaagaaattgtctttacccctataaactgaagcatttgaaaatcagtaatattaactgagcaaaataacttgtggcaacaggtatcagtctgggacacaatcaagatacagaaaccgggccgggcgcggtggctcacgcctgtaatcccagcactttgggaggccgaggcgggtggatcacgaggtcaggagatcgagaccatcctggctaacacggtgaaaacccgtctctactaaaaatacaaaaaatgagccgggctgggtggcaagtgcctgtagtcccagctactcaggaggctaaggcaggagaatggcgtgaacctggaaagcggagcttgcagtgagcccagattgcgccactgtgctccagcctgggcgatagagcgagactccgtctcaaaacaaaaacaaaaacaaacaaaaaaagatacagaaaccacatgctaatttaaacagagaaagtttaatatatgaagaattattaagtactgataggagagtaaccataaagatgtaagagaatctaaagggtatcctggagctaaggtagaggactcaaagaagagtgaactggaaggatttcccatcccaaggttggggtccaaacttcattgggaaaagtgtggtggaagccctctttctctacagcagaatagtttgctggggtgtcctggccggagctctggtccacagttgggctactgttgggcaagcagaaacaattctttagggcacaggtgagctaaggttggtgggtgggccttcagaaggagtgcggcactgaagtgaggatgtgtctgtgttggcagtgtgcggtgtcagtgctgggagaactgtggcaaagtggtcactaggcccttatatagaggctgtgaagtcaccaacagactgccccatctgggcatgtggctggggaaaaacaccaccagatgtcattacacaagcacgttgccaatggtccattgctaatggtccacattgctaatgatcgaagtaaaatcaaaatgtagcattagaaccaggaagagaagccccttcctcctgcagtgacccttcactgccctctactgacaaagagtaacgttatgctcacggtctaagaaaaatgctttaagtgcccaatacactatttctggttagctaccaaagagagctaagaggcaatacactggtaactgtcatgtcttgtacatgaatatcattattcatgtttttttaaaatcacagactatacttcttaacagctacatacattttatttatattcatcagaaacttactgcttattctttgcccttaactacttgtatagaccaacatggaaccaaatttgctgtcatataggctgttgatctcttcatccactagcacttttctgaaacaaaaagcaagtaatcttcgaattcacataagcatttatctgcaactctggtgttacttgacgactgacttctacctcccagtatatttgcttgtgaatatgtcttgttttttgctttagtccataagcaccttgagagcagcatttacctttgcattcttcactgtatcgtgcaaagtactttacccataacagtcacacaatagttgctgaattaattaataaaatatttggaataacaacacctaagagtgagaggttacaaaacacgatagttcaaaattcaacagttataaaaaaaaatcaaaagttaaaatacagaatatgttacagtattgaacattgtatggtaaatgtaatttactggaaagtatgaattttatagtgatcacatacttttcttaatatttagatatctgacacatgtaaagtagcaatagttcttattctgaaccattcttgaataaataagaagagaacacaacttggctaacaatttttatcaattcagctttgggtgctaacataatttaattgggaaagaataatcatttcagcaactagtactagaaaaaccagatatccacatgcaaaaggaaggatttgaaactgtggataacaatgtacaaagattaattcaaaattaatcataaatttaaacgtaagaactaaaactataattctttaaaaatatgagtaaatatggtgcacatacataaggtaataatttcttggctgcaacaccaaatgcataagtggtcaaaagagaacattgataaattgtacttcataaaaaatcatttgcccttcaaaagacaacatcaaaaaatgaagacaacccacagattgaaagaacgtatttgcaaatcatatatctgataagcgattgtatctggcatatatatatatattttaaaactcttacaagtcaataataaaaaaccccaaagaacctaactataaaaataggcagaagatttgggtagatacttgtccaaagaagataaatgactaatcaacgagcacatcagatgctcaacatcattaatcatgaaggaaatgcaaataaaaaacccaatgagacatcacgtcacacacactggaatgactataataataataaaaaaaacagataatcacaagtgttgggaaggatatagagaaactggaaccctcatatattgttagtaggaatgtaaaatggtacagccatttggaaatacactggcagtgtcttacaatgttaaacatagattcattatatgacccagtaatttcattcctaggtatctaatcaaggtaaatgaaaacatgtatccatatgaagacttatatggacatgttcatagcagccttattaacaatagcccaaaagtggaaagcacccaaatgtccattagctggtaaatggataaacaaaatgtggtatatccatataagggagtatgattggtcaattaaaatgaatgaatactgaaacatgctgttaggtgagtgaatctcaaagatattatgttaagtgaaagaagaaagtcacaaaagatgacacattgcatgattctattcatataaaatgtctagaataagcaaatgtacagagacagcaaatagtgattgcctaggactgggagtgggaatagagagtgactacaagtgggcatcaagtttctttttagctcaatggaaatgttctaaaatgagattgtaatgattgctgcacaactctataaatatacaaaaaagcactgaactaacaaggagctaaaactacaatgataatcatgtaagcagtgataattatttgattcccttctttttctgtttgaatcagaatgccttgacaattttttattcttttctcttctataggatttcaaggagtttagaactttacagaaataataacaaaaattacagcatttgattaataaatacatcttttagtaattttctttttgcctaaagtcaagaataattgttcatcttagtatgtttattaactactcttggtgttatgttgggcgttataataaagaaaaatctttgtttcaaaatttaggttggaattttggatcctactctgactaactaggtacactactgaatttacatcaagataacagtacagatagataagaacattgatttccttaagatcagtaatttgaagcttaaacatagtatgcaacacattgagagtctcaaagaagtaacaagtgccatctttagaaaatattttatatacttggtgtggtcttatcataagaagtatatacatacataccttgacatattgtactttgctttattgtgcttcacagatacagtttttcacaaattgaaagtttgtggcaaccctacatccagcaagtcaattttggtgccatttttccaacagcatgtgctcacttcgtgtatctgtgtcacattttggtaattcttgcaatatttcaaactttttcactattattatatctgttatggtgacctgtgatcagtaatatttaatgtcactttagtaattgcttggggatggcaagaactgcacccaaataagagtgaacttaattggtgttacgtctgctctgactgctccaccaacatgctgttcccgtctctcttcctctccttgggcttcccagttccttgagacacaagaatattgaaattattccaatcaataaccctactatgtgggtggtggggaggtgggaatgattaatgggtataaaaatgtagttagatagaataagatccagaaatgtagttaaatagaataagatctagtaacacaacagttatcacagtcaacaataatttattctatattgaaaaatagctaaaagagtataattggaatgtttgtaacacaaagtaatgataaatgcttgaggggacacataccccatttactctcatgtgattattgcatatgatacgcctgtatcaaaacatctcatgtaacccataaaggtatacacctactatgtagccatacaaataaaaaaaatttttttttaatccctacaatggcctttaagtgttcaagtcaaaggaagaattgaatgtttctcactttaaattaaaagctagaaataattaagctttgtgaggaagacatgttgaaacctagataggccaaatgctaggcctcatgaaccaaacagttagccgagttgtgaatgaaaaagaaatattcttaaatattcttgaaggaaattaaaagtgctactccagtgaacacaaaaatgataagaaagtaaaatggctttattgctgatatgaagaaagtctgaacaaaagattgaaccagccataacattcccttgagccaaagcctaattcagagcaaggctctaactctcttgaactctgtgaaggctgagagaggtaagaaagctacagaagaaaagtttgaagttagcagagtttggtttatgaggtttaaggaaagaagctgcctccataaaattaaagtgcaaggttaagcagtaggtactggtgtagaagctgcagcaagttatccagaagatctagctaagatcattgatatggtttggctatgtccccacccaaatctcatcttgaattgtagctcccataattcccacatgtcatgggaggaacccagtgggaggtaattgaatcatgggggcaggtccttctcatgctgatcttgtggtagtgaataagtctcaggagatctgatggttttataaaggggagttgctctacacaaactttctttgcctgccaccatgtaaaacatccctttgctcctccttcatcttccaccatgattgtttgaggcctccctagccatgtggaactgtgagtccgttaaactgctttcctttataaattagccagtctcgggtatgtctttattagtagggtgagaacagactaatacaatcattgatgaaggtgactacactaaacaacagattttcaatatagatgaaacagccttatattaaaagaagatgccatctaggactttcatagctagagaggagaagtcaatgcttggctttaaagcttcacagaataggttcagtctcttgttaggagctaatgtcaccagtgactttaagttgaagccaattttcatttactagtcaaaaaaatcctagggcccttaagaagtatgctaaatatactctgcctgtgctctataagtagaacagcaaagcctgaatggcagcacatctgtttacagcatgctttattgaatgttttaagcctgctattgagacctactgctcagaaaaaaaaaaaagattccattcaaaatattaccgctgactgacaatgttgcaaagagctctgatggagatgtacaaggagattaatgttattttcatgcctgatagcacaacacgcactctgcagctcatggattgaggaataatttttattttcaagtcttattatttaagacatacattttataagactatagctgctatagagagtgattcctctgatggatctgagcaaagtaaattgaaaatcatctggataaaattcaccatcctagatcccattaagaacatttgtaattcatgggaggaggtaaaaatatccatatgaacaggagtttggaagaaatcgattccaactttcatggatgactttgaggggtacaagattcagtggaagaagtaactgtaaatgtggcagaaatagcaagagaactagaattagaatgcagcctgaagatgtgactgaattgctgcaatgtcatgataaaaccttaagagaggaggagttgcttcttatagacgagcaaagaaagtgatttcttgaaatagaacctactcctggtgaagatgctgaggacattgttgaaatgacaaaaaaggatttagatattacataaatttatttgataaagcagtggcagggcttgaaagcattgactccaattttgaaacaagttatactgtgggtaaaatgctatcaaacagcatcacatgctacagaggaatcttttgtgaaaggaagatcaatcaacgtggcaaacttcattgttgttttattgtaagaaattgtcacagtcatctcaaccttcagcaactaccaccctgatcagtcagcatccatcaacatcaaagcgagactctccaccagcaaaaagattatatgactcactgaaggctcagatgactgttagcattttttagcaataaagcatttttaaattaaggtatgcactttttttcaacataatactatcacatacctaatagactatagtatggtgtaaacataacttttatatgcactgggaaatcaaaacacttgtgtgactcactttattgcaatattggcttttttgtggtgggctggaaccaaatgtgtaatatctctgaggtgtgcctgtatttggtcttagttcttgctgcctggcacagagctcctataacccttgttatttcctgattaatattggtgatagcagcatctttcttatatttggccttagttccattttctgacataagagcttctataatctttagaatctctggagtgcctttttgtatgctaatgagatgacaagtggctgagggcccctacatagcttcaggattgaggctagtcactagaaagacctgcatctgcaagggatgggctaggggttgaagattaagctaatcaccaatggtcaatgatttaatcaattatgcctacataatgagacctccataaaaactctaaattatggagtttggatagcttctcctaccctatactttctgctatatgtctcttccaggctgttcctttacaataaactggaaatagtaagctcttaaattctgtgagctgttgtagcacattattgaactggaggatttatagctggtcagtcagaagttccagaggcctgggtcttgcaactgatgtttgaagtggggcagttttgtgagactgagccattgacttgtggtatctgaggataatgccaagttattattgaattgaattgtgggacactcaactggctgtcagacaattgagtggtgagggaaaaacagaaacaaaaacaaaaacaaaacgacccacatatttgatgtcagaagtggtgtggttaaaacagtagtacttggcttttttttaaatttagaatctaagtacttaagagtagatatcttggcacctagtattaaatatactaggttctcaatacatattgttaaatgaatgactagtaaatgaaaaaagaatgagaaaattatttcttgctctgaccaacttcctgactgttttactctaagtcccaataaatatgaatattaccataatagctaaaagaatgctattgattaaaatgtttcctgtcatttgtcttttagcttgaacaaccgatatatatactaatcataaatataaaataacaggtgtgctataattttaaacagctacttttaaagttttgaaattgtagattaccctctgagaattagatgcatacaccaaggttattgctagagggcaagaattactacactttaagataaaacacaatggagacttggaagggtagtaggtgcaaggtgggtggatgataggaggttgcttggtggatacaatgcacattgctccagtgatggatgcactgaaggccgtaacttcaccaaaatgcaatatatcaatgtagcaaaattgcacttgtaccccacaaatatacaaaaatttttaaaattgataaaataataattaaaattgtttttcacactctaatgttaccttggtttgagatataatgtgatccttggatctcatggagaatattaataattctctttcttagataataacaaacctgtaactattcatatttgaaaaataaataagaactttaaaactgttaccacttccttacctcccttccagctatcatattatttagtatgctcatcaaagacagattttaatgtatattttaaatttcttaaaaagtttgtatcaagaactctaagaagaaagttgttttctgctgtaaagtggtagaaaaatcagaaattagttaaacaatgcaatgattttcagagagttgttcaatgttaatatataaattattttgtgcctgtttctgaaagcaggaaaacatctgagagtattaaagaactagcccaaatgggttcattttgaacaaatgatgagagaaggagagagtgaatgaaagtagtgagccaagctctttgtgtgattcctactcccagtgaggaccagaagggagaatcaaaaagaaagagaacaagcccagtgcaagaaaccatgcactggaattgtttccttcagatttaagtgttaattgactatatcttgtgtgtactgcatggactttgttggccttctgttttccttaatcaagaaaaccctaagttttgggatctgtttatacaacagatgatcttttggctattaataaaaatgtaaaattcttggtatttttaatgtgttatttaaatttacttcaaaagtaatgatgcaactaaaatgaaataaaatttccatgattatcagaataattaaataaatgtaaaactacaaggaaatattatgaagccattaatattatacttttgaactattctgatggcattaaaaaatgtttaagatgtaatatgtgctacaaaattgaaaacaccataggaatcccattattcaaacaggaagagaaatggtttagagcaaaatattaacatgttaaaagcaatattttattattgtggggaaaatcacatagattatgagatcacaaatattattttcttctttatgcttttctaaatattctgttttctataatatcaatgcattccataactataaaatatagtacttgaataatttgctaataattagactcaagcaaagaccaaagaatgcctcaaaatgagctaggcacggtagctcacgcctgtaactttggaaggtcgaaacaggtggatcacctgaggtcaggagttcaagaccagcctggtcaacatgatgaaaccccatctctactaaaaatacaaaaaattagctgggcatggtggcgcatgcttgtagtccccgccacttggggggctgagacaggagaattgcttgaacccaggaagtggaggttgcagtgagccgagattgcttcattgcactccagcagcctgggaaacaagagcgaaactccgtctaaaacaaacaaacaaaaaagaatacctcaaaatgataaaaggagaagtaatcaaatttctcagacactgaataagtaaaaacagctaacagtaataatttgaagaaaaaatgcattcagaattactttgaaaagcagtgcttaatcatagtatatataagtagttcaatactcatagtatatatgagtttagaataggagtttgggacttgcataagaaataaaagaattatttaaattattatatgcttcaagcatatttctacaaaaacagtatttgcgaaagcatcctataaaatgtaaaactgtcaggtattaatattaaaggtaaccctaaaaatgtttttgttttgtttcattttcatttaacaatttctattgagaacctagacaccgaaaacggaagtaggcagtggcaatgagacttagtcacatcagacaatatgctgcaccatattgcaaagaaggtacagtatagcagaggaagacaggggaataagcacaataaagtgcagtgggagagatgatagaaatgtatacaggacctaggcacaacacaaaaggaaattaatcatacttggggaagaagaggtcgtggctattcaccaaataaagaagcagtagcaaagacctagagatagaaacagctttaggtcttcacagaaatgcaattagttctttctgaaggactaatggtaaggtagatcgaccatggggtaagaaataaacctggacagctcatgaaagccagccatgctgaataactgaatagcttttactccaggatataacttacagtcttaaaaagtagagatgtggcccacatgtttgaaaggtcactggtggtagtatggagatcaggttctaattgagggaagggagtgggtgaacatttagaaaaagaccaatagaaacttcttacattggtttaggtgaggaaagatgaaagtcctaacaagagtattagaacatttatattttataatcctctgatttgctttgcaacaatttttactcactttatacagaacttactgaactaaactgatatgtgcagctcatattacagtaatgaaaaatgtactaacttgtgtaatgtgacaaatatcttctctatcctgcataattctgggggactcaattatctgcattataataatctcaactaatacagtgcaacaaacttaatctgaataatttatcagataatctgataattcatcagattcagtgtcccagaatctgatgaattatcaaattcatcagattcagtgtcccagaatctgatgaattatcaaattcatccttgtcataatttttttgtctcaagactccttttgattgttaatattattgaggaaacaaaaaattcttctttataatgagttcaatgtattgccatttaccatgttagaaagcagaaaaatcacaagcacatcaattaataaatttataaattataatcataaatcacatgtcaacaaaataaatttcaagtgaaaataaccatatttctaaaagaaaaagatctaatgggatgagtgcttggctaagttatgcaggtcttcaaaatattggaagatttcattattcatctgttaatattaccactaatcacatcagaaaccctgtaagttttgagaagctgttgagctcatggtggcagatgcatctttttcaaaataataattttctcttgaaaggccaaattttgtcactgacaacaaatattgtcaaatgtatttttaaaatgacagtctccatttattttcaaaaatttgtcttttcaatatctgtttgaataatcacaatttgtctctcagtcattttttcaaataaaaatagtattctatggaagtacagctagtttagcttgcaactcaaacaactacacaagtgctttaccttaagacaaccagcattattgttgatatacagcagatgttaatcatgtatactttccatttcttcatgtatactgaatattaaaaatatgtgtacttaatggtatagattaaataaaattaatttctagtgtttcgtcaaagacattcttttagtgcaactggctttaattttattcatttatttatttacttatttttactgggaatgaattacagtgaagaatacaatgacagtatagtttgttgtcactgtcttgataagtgttaaggctaggggtttcattgttcttccaaatgtcaacacagtgaaaaaggtaaataatgtttttgtatcattatgaaaatagtttggacctgatgaatcatttaaaaagtctcaagggaatgcaagagcatctgtggaccacattttgaaaataactgctaaaatcacattaagaattttttggccgggcacggaggttcatgcctgtaatcccagcactttgggaggccaaggcaggcggatcacgagatcaggagttcagcctggccaacatagaaaaattagctgggtgtggtagtgtgcgcctgtaatcccagctactcaggaggctgaggcaggagaatcgcttgaacccaggaggcggagattgcagtgagccgagatcctgccattgcactccagcctgggcaatagagtgagactctgtctcaaaaaaaaaaattttttttttgattttttggattatattctatatgcattaaagactatgaacattctgagaacatgactgtgaaaagttttttttatatgttactgaatggaaggagggttagaaatcagcagagtatgcaaaaacagagtaaaacaaaatgcctaggaatgaaaaaaaaaagagagagagagagagagagtcagggagagtaagataaagtttggtcccagagaagatacagtcaagattccactttttgctattccacagagatttcaggaagaaaaatcacactcctattttctttttctttgcttactgatttctatttagtttcttttttttttttttttttttttttttttgagaaagcgtctcactctcttgcgcaggctggagtgcagtggctagattcttcttgagtatgctcaaacttcctttttggaatgtcttccaaaggcactcttgccttcatttgtacaagttgattgaccctttaaaggccttaaatattattgtgcgacctcacagactcctcaaatcacctgaaacctgaaatgctgaggcccaggtggcactgaaatgatggtattctagacctgacaccggactgttttctccttggttttgtcccaacacactgacatacatagcccaaaatactactggcctttttaagtggcatatcacattccagggtaatatcaaaactgctgcctggtagcatttgtgaagtctcaaagtaactctttccaggattttcaaatccactgaatttcttagattgaaatatgtatgtgacagaattctcttagctttctttcctctatgaatatgtaattggaaactctgagatccggtttctcatctttattggattttttctttaatcttaaaattatgaatatttgctttacaataatctagataaggagtccccaacctttttggcaccagggactggttttgtggaagacagttgttccacggacattgtggggagtgggggctggcattagaatctcataaggagcacacaacctagatcctgtgcatgcacagttcacaatagggtttgtgctcctatgagaatctaatgccgccactgatctgacaggaggcggagctcaggctgtaatgctccctggcccactgctcacctcctactgtgcgacccagttcctaacaggccagggaccagtactggtccgtggcccagggtttggggacccttaatctgatgttactaagttacatcattaataatctatttctcctcacacagatttctttcctcacatcctcaacacatataatttcacatctccaaatgcagcattccctaataattacccttcttactccattctgccacctctggctcattttcacttgccattccatttgataatctagtaacttcattttgccaacttgatgaatttggttctaagtagtttaaaaatttaaggacatactatgtcagtatttacaggtgcttcttatttattcttcagtattctcaaatgttcaatttgaggtcaagttttgctaaaaacaactcattgcaaatagtagatgttttataaatataagataaatttcttaaaattcgtgctgagttctaaagagaaaacttaggttaccaagtaacatgattttcagaacaccaccaatttgctatttcaagtctaattttatattagaccgattcccaaagcttttccattgttacaaaattttcaaaatactgtacttttattatacaaggtttgtggcctagttttattaatattccaaaagacaaaatattcaaacattcaattgtttcatcaataatttaaactaaatttactattttgattaaagatacaatgagtatctttgcatgaaatagattactaaattctatttgaaaactaatgtacacttttattctagtttttaaggcaacatatgtttattttgaactttattttaagaaaacataccaaaacaatgccaaattgtttggtaagaaacaataccaaagcatttgaaaaaataaattattaacaataataattttgttgtgtaaaattgtgagttatttcatcattttattaatttatatttcccttttgctttatgtattacttttgctttatgtattacttttgtcataagaaaaataagatgtaatattctatttaaattttttttttgttttatgcactttatgttccttttttatgtactttatgttccttttcctttatgtattacttttattataagaaaaaataagatgtaatattctatttttaaaacaaaaactttataaagaagaaaacagaaatcctaattctataaaccagagataactattatattatcttcagggctttttctaaggaaaaacatgtttgttttttttccgtaattggggccatcctagatatatatgtttgtaaggtactttttaatatactattataacctgggcaattttatatagaattaaatattcattgaaacattatgtttaatggtactataatatttcatcatttgcctagactatgatttatttagccattctttcaaccttccagcattgtgtatgtagactgttttcttttttcttttctcttttttttttttttttttttttttttttgagacagagtcttgctctgtcatccagacgccaggccggagtgcagtggcatgatctcggcttgctgcaacctccacctcccgggttcaagtgactctcctggctcagcctcctgagtagctgggactgcaggtgcacaccaccatgcctggctaatttttttgtatttttagtagagacggggtttcaccatgttggccaggctggtcccaaactcctgacctcaggtgatctgcccaccttggccttccaaagtgctggaattacaggtttgagccactgtatctggcctatgtagactattaatctctccaattttgtttgggttgaattagttttcctatatggggatagtttggtggaaatgtcagtcaaggaactgttagttaagtttactcttaactaaaaggatcagattcatgacccaaacttgaccaaccagatgtttacttcctggaattttggtgttaaacatgaatgtcaggaaaaaaaagaaaaaaaaaaaaaaagaaaaagaaagaaagacaaagagcctgaaagcagttgagctgattcattctagattacagcaccttacagaaaccaccaaaagtctaccaactgggctatctgctcttatagttttctctgctcctggcatttttcagtctagattgtagctatcccttaactctgtgaactataatatcttttgaagacattgcttttatacttaaattaacctgagtcagtttcagttacttattgtaatactttaatttttttttaccaattccccatgaattcctaattttatatccttttctgtcactttcctcactgaaataaatgagcatcttaattcttatcacagatcatgaatgtaaatgtgacattataggcacagcagtggaatcagtgtcaccatcattttatttctgcccccactttgttagtcatcatgcctgtaattacaaacctaattaattgcctttattagaatcttaacacatacacagataactcattattatccagtaggaggagggtatgaataatgaaaatccatcatttataaaataaccacaacagtttcatcaacaacaaaaaaatatcaatttaaccttctttgcttatgattttagtagtcataagtattgccagagacaactgttagaggctgaattgtatcctccccaaatccatatgttggagtctcaaactccggtacctcagaatgtgactgtgttaggagttagagcctttgaagaagtggtttagtgaaatgagacttttagggtgaaccacaatccaatatgacttgtgtccttaaaagaagatgaaatttagacagaaaagagacaccaggaatgcacatgcacagaggaaaagacagacatcagcaagccaaggagacgggctttagaagacaccaaacttcccagtaccttgttcttggacttcgagcctccagaactgtgataaatactgttatttaagccaccctgtctgtggtactttgtcatggtagcccaagttaactaatacagaaaccaaccctatttgaatggcacacctctatctcaagttcagtagtttccccaatggtatctgtgaaacaaaagcatactagcaacatatattacaaagaacatggataatatttgtgtaactttgggaaagcatgtgcaatacagtaaatatgtttctttggaataaatataacctttccctggaaatatttgctcattatctccttaaattttcagtggagtcacaaatgaatatgtttccaataatgagaagaaacattttgttgtgaagttagatcaataaagtgtttaatagttaagggtatatggatcagttttctgattctttaaagttatgtggattctcaagaacaaagaatctcactgaccttttcttaaaagatatatccctagtacccactgtaagaaataattgatgctaaaatcataaacgcatggacaacaatgttaataagacaattcaccggggaaagaattgtcttttcaacacgtggtgctgggacaactagatatgaacaaacaaaagagtaatgctgaacccctacctcacattatatgcaaaaagttgactcagaatgaatcctagatctaaatgcaagagctaaaattatacaactagttgaaaaataatagaagtaaatttttatgacctcagattaggcaacggtttcttatacatgagactaaaagcacaagtgacaaaagaaaaaagttagagtagattcttcatcaaaattaaatctaagtttgtaggtagagcaccaaaggagaaacaggcaatatgataaggcaaagacttttgaccatttacagagaaaagctaaaatgtcaggttgattctaagttagaagagaagcaaattcacattttctagagaagaactacagtgtccataggtaactgagaatgaggggaagcaaatagtgaaaaaaatataaaaagataaaccattggaatatgagtcttgaaggaataaaaatatggtaacaaaagttttaacatagatgaaaatgaaagctgatgtttatcaaattattttgaaatcacattcctactcattcatttgcaaaaaaaaaaaaaaaaaaaaaaaaaaaaaaaaaaaaaaagatttgttcaaatccctccaagcagctcctgtgtcctggccactatgggggatgtaaacactggttttcatgcttagtgtctctttcttgcctgcacctggtcagtgtatcatttctggaggaagaaaaactgactgggtgactatatcattctaaccaatgatctcattcaaacaatttttttttcatcaaatagtaccttttcaatattttttaatttttaaaaaagtttttagacaagagcagtagtgagaagaggggaaagcgtagaacaaggagtttgatctgtaactgactgtgaacaatcaactgagataactcactacctttggatcagttcttttcaacatttttgaggcaatttttttgcattctaggaactgcaacattttttcagagaactttacaaactctcaaaacttttttttgtgaaaatgactgatttatgttttttttaaacctaataacttgttaacattgaatgttttaaatttatttgacataactctttgatttgtttttttaaaagtcgggggcagttagagccctaagcccaatctctgagattccacagatctggctgcacacctctatggtgctatttctgttcgtttcttttactttcaggatcacccacaaggtttgtgccactcttcatacctgtgaggcacttcaccctttagcacctttgattcaatccatcattggcctcattagatttctgcttaaaaaaactttttctccacctctttcattattttctgtttgcatgcccctctcatcctcactatctctttatcttgcagtatttttcttcaaagaacttacatttactgacatttctttgcacattgatttgcctactgtccaactctatcaccagactgaaagctgcatgtgggtaggaattttgctttattcaccacattcctgcacttagaacgcagacccttctatcttctattgtacaggagagcttttttttttttaattttttaacaaatagcccggtgtgatggctcactcctgtaatcccagcactttgggaggctgaggcaggcagatcacttgaggtcaggagatcgagactagccgggccaacatagtgaaaccccatctctacaaaatacaaaaattagccaggcatggtgacactcgcctgtagtcccagctactggggaggctgaggcaggagaatcacttcaacccgggaggcagaaattgcagtgagccaagaacgtgccactgcactgcagcctgggtgacagagtgagactctgtctcaaaaaaacaacaaacaaacaaacaaacaaatggagtggatttgggtaatcattctaaaccaaactgtttttggaattttggcatgtcagaaagcagatgaattacagctcacatgtacgactgcacccaacttcagtcctgagtctcttggctaagctgtagctctaccatcacatggatgatgagcaaacatcaagaacacagacgccatggccacggtgtggctggactgcttggattctgccacttactaactgtataacccagcaagttaattgaacctcactgtgccttggttttgtcacctgtaaaattaacaatagtatctacctcataggattaaatgagatcatatttgcaaagtactgcttaggatagtggctggcacagagtaaatgctatatgtttttgataaataaaacaattaataaatggaaatctaggaatgtggacaaaatttaaaagttggaaaagcaaactttggggcagcttggggaattctgtcacaacttatttttctgatcacaagtgcaatgagaataaatttcttcccaccctaccctaaactaatgcaatctcaattgagcggtggaacatgcttcattcactaattagaatttaaaaaggaagtgataacctcacggagcacagccccattgaccctgagggtgactatacaggaccttcaattgctgattctctcccatccttctctgggatctgtttctcccaccctccccattctgaggtagctggaagagagtaggctttgtgccctttggcgagtacagggagaaaatagtaggttcagcctctccaactgcccagggagaaagcaatacctttcaaggtccccaggctaaattttggagggatgcttttgtgtgtcactgtcaggctcacaccgacataaacccttgagaaatgcctggttggtgacgtcctagaggtaacaccaagcaagccccagattttctcttcttcgtcagcaattcccagatgaggtgctcttgtgtttaccctctctgattgtctggattccctgatagtaccctctatacaaggaactagaatgtttcttactggattcctctgttggtggtgatagagtttactttgggtatctagtcggtctggttgcccctggtatctctggttggtacaacagaatcctgactgagctccttagtgccttcttgaatactgtataattaactaggcctccaattgtgccccgccttgccccagcccatagatggacaatccctcctgccatgtcttaaagagaaattaccataataaatgactctccagacagcacatttcccagcaagagggggcatgtaaaccaagtctattagtattggcagcaaaatccaatgtgttattgttaccagtatgaacactctgggtatcctggcctcctatatagatatttgaaacaaaacagacaaacaatgtgaaggaaggaggaaaaacagccacacaaatgagttacagtgagtttaatgaaaactaattccattgctgggtccatgtgatataaccagccacttgtgctctgttctagtggtttataatgttacctcaccctctccaagaaattggtttcccgtaaatctctgtggccattcattcctgtctacacattatgttcctaaaatagacaccagctaaaaatctcttccaggagctttgtgaaggaaggcctaaattgcaaaactcctcctagaagagagatgtgattttgtaattgcttcattgcaattacaaaagcaacaatcataaaagagagttttaaaagagtttttcaccacagtcattctcctgaaatgcacagctgagggaaagaagaatgtcagatgccccgcgaacgtgcagaagctcccagttgcatcaccctggcgtgccaggtattgcagcaaataggaaaggtaagctacccacttctctgggcaggagaaactaaagcaggaatcaccaacctcagcatggaattttcctatttctgtctggcaacatcctcttgggatgatttaaagtgctttttggagaaatatgttctgttactatactagcgcatcagaaataccacgtgaacctgtaaatccatagaagaagaagacacattttataggtgtgatagcaacagcaattggcaatttgcaagtttgctactgcactcagaaatatttagtcacatgcacatattgacagtaatataccctgccttgacttaattgttgcattggacaggtgaaaagcacatacccaccactccagaccgatttgttaacaatcaccagtgagtaatcaaagagaacaaaaagaaatgagaagtaaatgcagcaagtgggtcgggtctttaaacacatacctcaaacaggtaggagtcaggaaatccatgatagcaaagacatttggacaagcctcacctccactcagaaataattcttatgctgttctgaaaagcaagacggttcacactaggaactgagcagtatctgcagtatcattgctggttgtgacctctgtctaagtaaaagtaagtcaatgtttcctatttggcattggatagaaaaggggactctttaccactctgctcaagctcttttttagtgtggctcaataggagttggcagaggtggggggcggaaatcattgccccttccttgttcaaggcatgaggcatttcttctcaaaagcccagcctcagcctcaggaagctgaatacccctgcaatgctaggctccagcagcagccccgctgccttctttcttcctgtggagttaaaactgagatctaatttttgctccgtccttaagaacaatatgacctctattcccagccagctagtccacttccaaagcaccagtgaaggagggggcttcaacaggatcaaaagggaccttgaataggatgaaggcaagcaaaggcaagaactggccagatgccaagctatttcaggccaaagaatcccatcttctatcaaaatgctgaactgcaaaacaaacctgatttcagttcatggaaggttgagagaggaggggggaggggaggggaggagaagaggaggagagggaggagggggacagttggtctgaatacacatacaaaaatggacttcctgctctgcccaaactgaatttccatggactctttttccaaaggaataactggaatgaataaacttaaaatcaagatgaaacaattagatggcttacctgattaaaaggaaaattatccatctgcagtgaggaacagcatcacccaaagacgagatgataacaatgtgccttcagttgcaattgttcagattccttcttgcaaaaggtgtcaaagtatttacaagggctgcagtctcactggggcagaacacacagacacacaaacacacacaaacgcacacatacacacatgcaccagagacctctgcagtatcctctcggcttcatcctcgcctcactctatggtacctaatacaaatcagcaaatagcttgtttcaaaaaaaaaaaaaaaaagtcaagacagcaccttacattacatcgccatctagtggctaaatattaaacactttctcacaatccagatttatgatttcttcctcaacctcttttctctcagccttttttcctttcttctctgtaatctcccagtattgcttctccttgcttctctttcattccctattgctatataatatcatgaacctaatgactcaaagaggaaaaggtttgaaagtaaatatagctattttcaagtagtacttgaaaaactttagcattattttagtttgaaactgttactttattcctaatatgaatcattgttatctataaaaatgatatatcttataaataaaactgtctttttattccaccaggaaacaatcaggtggccctttattacagatctatggcttcacatttttctgttttaatattgtgttttaggattaggtttcatattatagtgaacagctcagagtcacaaaatgtgagttttacttcaacactgatgaacacatgcctttaacaaagccactgaagtcttctatggacatttacattcttactatcttcatctgtaattacagattaaacaagactttcaacccactctcaatttctatggttttactatattttactccaatgttttcccatcttgtggacacagcctaaagcttaattataataacacattttaataagcaaatatatatagaaagagagtccaattgcctattacccaaagatagaattataaaaaccatgaatatcagttttttctaagacaataaaaatccatgccaaactaattataactcttggaactgagagtagagctttttatgttatatattgtattctaaaatggaatcagccttaaacattcagtcatacataaaatcacgattatgtgtagattagtcattggaagtaaatatttcatcctcattatttttcttttgccatctaacacacttattacaatcattgcatgtgttttatcatttatcaatataaccttcaatatttaatccttctcttccttattacaggatggtgagataaatactattaatgttattatattataattattcctatttatacttgagaacactgaagctttctgagccttactgaggtttattcaagaccacatagcttgcaaagcaataaaactaaggctgttggtcccaagagcccaaagaataatccactgttctttgcaacatacctaaaagttcaccattttttcctgttctagaatcacagaaaagtaattttgatttctatgtttacaaaacatttactagcccttaattatggaccaatgggtccatcttgtggatccatctttttatctataaaagaaagaaattaagtaagataatttcctgttccagctcaaaaactctatccagtgctttcccaaaagccagttggagtagcatgaacacattcatttgaagttactcaatgtctgggaaatgatgttgcccagtatctggtagagtcagggcaaagttgaaagaagatgaggagacaggtgatcaacaactggtaaacgattgccaagatgttagagatgaaaagagagtgggaactgcatgaactaacaggcaatttttttagaataatacattccatatgaatagtacttagagattagatatgtaaaaacacaaaataagaacatacctggccacatgttttaatgaattctaattgcatattataggtgccaatttttctgagtgtctgctcttaacaattcccccaatagttcttctcccctgatccttagtggtaaacctaccctcttgctacagaggactggagcaagagagggtatctacgcagctgacctggtcaaagagagccactacatgtgattctggcagctatggagtcagctttccctcaccatggggactcaggaccaggtggaccaggatactgaaatagcagccagccacacagatgtggaggaagaagtgacaaaagacagagacagactgtttccatctccagtctactcaagatccaaacactttcttgatgttgagtcccatgataaactcaaactccatgtttgcttaagtgaacttggtttctgttgaactatggagtcctaaccacttcattagcttcaagaaagttgccagtactgcatctatcaagtattattcatattctgggcatctgacacttcatttattcacttcttcatgcacctgatatatgccaggcacttttccagatacttaagtaacatcggcaaacaaaccagatcaaaaccctccctttgtggagtttacattgacatgtcagtcatatggaaaggcacaacgcattcagtgtgcacactacctttcttccgcctccatgtctttgttcacaaccttcacttctcttggcagacctttcatccatctacacatagcaaattcggcggatattttaaatgtctgggtcaaatattctctcttctccaacgtcttttctattttctcagcagatagaattcttttttcttttgttaattatagaacaattttatgttgtatcttatgaaacatggtcatttgacaagttgaaagcattgagcataaggagataaatgactattctcatacagactcctagaaaaggccaatatcccaagcatggcccaaagagtactattaactaacaactcatcattctgtacacagatacttcattcgtcagagctgaagcagttttacagtattagtaactttaaatcttccatgtttcagactgagcataaaggcaaaatatgagatttttattaaattagtgtaatatgcacttaaaatcacatatttattttttaaagttagcagaagatattaaaacaaaactctgtgctaccctatgtcactactacacttatcccatttgaccttgttctaagagttttatatatgtatcttatttggctcccagaatgtaaactccctgtggaaccagctttgcattttatttatttttttgtagattaatttattgagagataattttgtctctttctcactgttacgtttccaacttcaaaaaatgaaaaactaatcttcctctgcccccgttggtaaagttagccattccaggaacccctttgtaatcttgtttcagaagctggaaaaaattagctgcctacttcctaggtgacaatacttcaatctgtaatgcatgaacctgctaaacaggctgagggggcatggctgtggcttttttatgagagttcctaacaaggaaaagagaatgaaggcgtaagatgtcatttagtctttgtaagactccgtctctgtaagactccgtctctgtcctgtgaatgtggttgttactttgttatagctctgtcagttgcactgctcagtgccaaaacataaaagggaatattataatgggacataatctctgtcaatagattttgggtattaaagagagcgtgaggtcactcaggtggaaaaagctgggccaggtaattttgtctgttagttttacgacataaaggagagtctctcgatgccattagatcttgaaagagttcaaagagagaactatctcattatcagaaggctgaggaattagtgtaattagtatctgaatattctttaatattttcttgcatagaaaataaaggtaattggttatcaaaaatattctttcaaatgtgtatctcctggagttgtggagttctgaaactttaaccagctgccttatgaagagaatttattaattaactttatgcctgccaaggagaaggaaaccattcttaatttttagccaaaaatttcccaaagtgatgaccaaatcattatgttttgagttccagattcccttgtttagagttataaatgacatttgagttttaaggcagaaatgtttctaaattcccctgtcatttgtttgggaatctatagtcactgagcaacatgaagctgggtctcccctctcttcccaccgcaggaaaggaattggaggctggaggcgaacttgagtaccttgaggtggtatcccaaaggagatggtggtgacaacagacaagtctagatgttagcaggtcttctgatgaagtcggggagtgatcccaacacagatagcaaatgctagagtttggatttaaactcagaccttaagattttagatctacaggaccactgtatcactacaaatcctgactttgcccccttttgattggaataatcagataaagcacactactgatgtgatccttggtaaatgtaatttactacttaagtactttgcttttgtagatgtcaatttcctagtggtttttttttttcttttggtaaatgcagcattctgcaaaaatctactaccaattccttgctctcacaaagcattcaccaacactgtgccactattttagaaatagaaaccatatcctagccgaaaatgataaactcatatatttccttttgagattaacctgcccttttgaaagggagtcagaaatgaatgtgaaatttatttgctattagacaaataaatgcagaaactgcaattaagaactctcttttaggactagagccaactagtttttctgcaagtttaaagttacaattttttgatggcaagaattggccaactgatttcaaaatatcttataggtactaaagtggacttttgaaactctggtaaagtccatacattccataaattaaaaaaataataatcagccatttttttcaaatatgatataaaaatatctgagggctcctcccctccccgcaactggaattcactgaatcagagctgctataggcttgcattttttgatgcacagataaccagtttttaaatcacttgtaatataatgaacataaataattgaatttttttttcttacagatttgattctgaagtatttttgaagtatctttagaaccaatgtgcttgtgggcacacattacactatttaaaattttattaaaagtattttaaaaatccttagagagagaatgccagttatctctctctctttctggtagtggagaagaaaaaatagtataggcttttcttaactcaccacaatgcagtaattaaaagcaaaagagaaaggagggaagttgtgggattatgatggagataatcagattccccagttgccctctgccttccctgctatcgagacaacgcacagaagccagaattatgtctgcaggtgattatttcagggaagcagttactccttgttggaagattcactgcaatttcctttcaattacataggcagacattggtgttggagagggaaataacaatattcctaaaccaaataagtagcttttataaacaagacagaataatacatgaacctgatttctcaaagggaaattaagtatatgaatgtcaatcatctgatgagattagcattacaatataggttcagaatgagtattaaatcacaaaattactttttatcacttgatgtaatagcattattcctctgattatatcaccaactgaacagcacttcaaaaattactatagtgctctgtatatatctttaattttaaatcctttattatttgggggcctggtttatttttgatcttttcttctttagctaacgtgtaagaagacattattaatatttagtgaagatgacactaaatgtcgtttttcaaaacaacaaactctgccttttcctaaacaagcagggagccattatgccttcactgttccgcttcctttgtttcctctgttttcaggaccttctcttctttgaccgcatcttcctccaccctctatcggtgcacctctccacggtctgaccccactcaataatctctttgaaagtaagaactatgacttattttttttgtcattgttccccaaacatatcccaagtctgtggtagaattaaggtagtttctggagagaacctgataacatctgctgagtattgatgaataaaaattccgtaatagacttccaacaaaaccctggagtagaataaaataactttgtaaacctcataaaaaagaatgtcaatttacataaatcattaccattgctttatcgatagggttttgctaatcattgagaaattgtggagctggaaaagtctcagagataaaccaggcaagtgttcttattttggatatgaggaaactgatgccaagagaggtgcagtgacttgtccaaggtcacatagatagttttataccacaaaggtccattcaagttttcccacagtttaactctaaaggaaattaatattgagtaaggtacatcagcacataagaagcaaaatggaagtgagtgaagtatttctagatatgccacaattgattttcactcatgttttgacagagagatggatgtgatgaagggtatgaatgcagttactgtttaagaaggtgatggactaaccaacattggttttagcaaagaataaagaaagtgactgtccttcaatctagctccacatgcggttcttaaatattaaccacaaagtactcaagcccaagggcacgagctctgggtatgcagagtgtagcattgacagctttcaggaatgcaggcccaaagacagctccagaaaatatccaggaagcaaactatcttgaagttctatactttctttgaaatgccaagatgtaatctaaaaatatgtgttctacttttttagtctaataaaccacatttatatgatggttatctgtcatatggggagacaaaattcaacatttcacatgcctgagctttatacccctcctttaaatgtatcaagatttcataaagctttggttcttcagaaaagatcaaggtacatcacaatatttaaagcattatctccatatctattgccacaggaggataaagagaaaataaacataaatgcaaataatgaaaatgcctgagcaatcataaagaatgaagttactgtgtggattctattctgtgtttatgtgttctttcctttgctcttaagtcagttaaacataatgcttgggttctttcctgatttatttcattcagcaatcccccctaccccccgacatcccttgcaaagatgaatcaacaaaagctattaccaagaacaatatgattgattacttattggaactcgaataccaattttccacttaagtatatctttatatcaatcacctcacttgcctacctattgaagagtttcaattagatttttttaataaagaggactttctttactctaaaggatatagctgatatttatgaagacaacgctttatttacagaataaaactgaactttgccataacttagcataagcaaatatgtagtttctgtttccctaaagaattcctgtcaacatctttttcctttcatgttcaaaggcagaaagtcattgactttaccaggagcacagcaaagccatctgtaaagtatacaagtgtcgctagaattaggtgctaccatatttcttggggaaattaacatttttgacacatctgtatgcagttccaatcttcggatatcaatttacaaactcacataaattacatttggttacatcttttctttttgtttctttccttgagaaaagcaagaattctactctaggccaaataatggacagaaatcattagggtccactccagggactgaggccctttagaagagattggcaagtgactagggaaaaggtacatcgaaggtcagaaaataatgacatttagcctagttctcctcgtgattccttggaaattttggggcccatgagctcagttgctgcttctgggattgcccctattcatatcaaatagcagagaactgagatgtcttacccacacctgagaagattcggatgtgagcatgggatagaggtgctaggcagcggcactttcatgcctaagtgcagtctctcatacctgttcatctgcagtggcatgaaaggcaaacagattcttctgctcattatgggttgttgaaatgacagaaccactttgtctcaacattttctatgacacttgatacataaggaagctcagagactaaagtccttgtttccatgttgcactaggtctttttgaaagtctcttttacattctgattgctatcatgacatcaaagtcacctgtattcctcatctttgtggggaagagcaggctaaataaagtaggtaaggacaccttctgagtctgcacccctttaattgacacataggggatgtgacccctgacgtttctgcttcccttattctttctgcaactaagcaaacatagaatgtggattttcccatgctcttagcaaggatgaaactcagcgatcatttgctctacttcacatggtagttgtttctaagattacatatcatatatatgcatatatatatatgttatgttatgctacacacacacaactgctaatgagtgttctctctccccttttcttgtccctctgctctctaggacagcagtagctttatatgtatctctatctgccctaagtctcctctcttgggcatcacaaacagagttacccttccatgaaccatttgttgctttaaaattatacctcagatgcagtcatggtcctagcagaaagtagatggtacattcaaaatggttaaaataaaaataattatggagaaactattgaccaagtgggttaagatggttgatgagtgcccaggaactagcaatagagagagccaatgccattccaggcaagagtgaaagtggcaccagattccggtgagagctagagctttagaagacccaactgagaggtttaactaaagaggaatgcagctgcttttttaagctaggaagtgaggtgtggtcggggagactctccaattttctgctaatgcctgtcttgggctgcattcaaagccaacggatgaaggaccccaagtttctcaatccctggaaagtggacttgaaagtctttccctctacttgtccattattccacttctaacctacattttaatactcccaacactctcttccctggtctgcattccttggagtccagtgctcctgctagtagcccttcttccagggctccagcatttgttgggctctgggaatgttttttccaggttggcagttgtgaagggctggtgggaactggggaaaataacaatgtgtctcatcttatctctaaaaacatctctttttctttgtttaaaaagcaaaacacatgtgtctaaaatattttacagagatgaacaaaaatctttatgataaaagattctatttaataccctaacccttaatacagtgcctagtatatggtagtgtatgatatggtttggctgtgtccccactcaaatctcatcttgaattgtaactcccacaattcccatatgtagtaggaggaacctggtgggaggtaattgaatcatggtggcgagtctttcctgtgttgttctcatgatagtgcataagtctcatcagatatgatggctttaaaaatgggattttgctgacacagctctctttttgcctgctgccatccatgtgagatgtgacttgctcctcgttgccttctgccatgattgtgaagcctccccagccatttggaactgtaagttcaataaacctctttcttttgtaaattgtcatgtctcaggtatgtcattatcagcagcttgaaaatggactactcagtaaattggtactgggagtggggcactgctaaaaagattcccaaaaatgtggaagccactttggaactgggtaacaggcagaggttggaacaatttggagggctcagaagaagaaaggaaaatgtgggaaagtttggaactccctagagacttgttgaatggctttgaccaaaatgctgataatgatatgaacaacgaaatccaggctgaggtgatctcagatggagatgaataacttgttgggaactggagcaaaggtgactcttgttatattttagcaaagagactggtggcattttgtccctgccctagacatttgtggaactttgaacttgggagagatgatttagggtatgtggtggaagaaatttctaagtggcaaagcattcaaggggtgacttgggtgctattaaaggcattcaattttaaaagggaaacagagcataaaagtttggaaaatttgcagcctgacaatgcaatagaaaagaaaatcccattttctgaggagaaagtcaagctagctgcagaaatttgcataagcaatgaggatctgaatgttaatccccaagacaatgaagaaaatgtctccagggcattcagaggccttcatagcagctcctcccatcacaagcctggaggcctaggatgaaaatgtggtttcatgggccaggcccagagttcccatgctgtatgcagcctagggactttgtgccctttgcctcagccattccagctatggctgaaaggggccaacatagtgcatgggtcatagcttcagagggtgcaagcctcaagccttggcagctcccacgtggtgttgagccggcaagtgcacagaagtcaaaaactggggtttgagaacctctgcctagatttcagaagatgtatggaaacgcctggatgcccagcaaaagtttgctgcaggggtggggccctcatggagaacctctgttaaggcagtatggaagggaaatgtggggtcagagcccccacacagattccctactagtgtaccacttggtggagctatgagaagagggtcaccatcctccagaccccagaatggtagatccactgacagcttgcactgtgttcctggaaaagccacacttaatgccagcctgtgaaagcaactaggagggagtctgtaccctgcaaagcaacaggtgtggagcttcccaagaccatgggaacccacctcttgcatcaacgtgacttggatgtgagacatggaatcaaagatcattttggagcttaaagatttgactgccctgctggatttcagacttgcacagggtctgtagttcctctgttttggccaatttctcccattttgaatggctgtatttgcccaatgcctgtactcccattgtatctaggaggtaactaacttgctattgattttatagcctcataggcagaagggacttgccttgagactttggattgtggacttttcagttaatgctgaaatgagttaagactttggaggactgttgggaaggcaagattggttttgaaatgtgaggacatgagatttgggaggggccaggagtggaatgatatggtttggctgtgtccccactgaaatctcatcttgaattgtaactcccaccattcccatgtgtcatgggaggaacccagtgggaggtaattgaatcatgtgggtgggtttttcctgtgctgttctcatgatagtgaataagtctcacaagatctgatggctttaaaaatgggagtttgcctgcaaaaactctctttttgcctgctgccatccatgtgagatgtgacttgctactccttgcctccagcatgattgtgaggcctccccagccacgtggaactatgagttcaagaaacttgtttttcttttgtaaattgcccagtgtattagttcattttcatgctgctgataaagacatacctgagactgggtaatcatggcagaagatgaaaggcacatcttacatggcagcaggcaagagagaatgagagccaagtgaaaggggaaaccccttataaaaccatctcgtgagacttatacaccaccacaagaacagtatggggaaaactgctcccacgattcagttatctctcaccaggtccctcccacaacacatgggaattatgggagctacaattcaagatgagatttgagtggggcacagccaaatcatagcaggtagagactcaggaataaacatatggatattcaagcagtactatttttagataaattctaagaataattttagaataataataattgttgttaattttattgaggacttaatatattttgggaccttcaaacctcacaacagtctcataaaatagttgctattaccatgttatcttcatgaatttataaatgaggcaactgaggctcagagtagttgagcatcttggccaagatcacacagtaacgaggtgactaagtgtgattctgaaaccagcagtgtatctccaaagtacctaatcttaccataaggccatactaaaactctccacaatatcacattattaaaattatggtggaaagtctctgcaattcgagttcacaggcaaacaaacagaagacaatagtctttctttactgctaaggattacatcacattaagctcatataaggacataatgggggagagacatttctacaagtagctgaccgaagatagtttttaggtgtatgatcagtctgtagcctggattcttgtcaaacatgttagggggcagcatgtggcagggtgggagggaggcaaatggagatcttccttcttacttgtctcagattcttcaatcttccatagcaagtgaaagaatataactatgtttggacgtactctcaccaagttaacaaatacactaaacacatgagtagtgaggggagaagcatgcctcaatctggcaaagcttcaatctccagaagtctaaatttgttagaaatgaaaaagctagcaaagcagaactgctgatcgtgaacacttaacagtaagcttcctttggtggaagcttcatgttgcaaacatcgtatttaattaggtgtttttttctcagctcattttctaaaaacaagtgcttttcggctctgcttgatgtttgtgaagacacggaccgcgcaaaaccaggatactttcagaattttaaaaccttgcttctgaaagtgtggccacatactggcagcatccccacttcttgggagcttgttgaaaatgtggactctttggctccacccagaccttctaaataagaaagtgcattttaacaagatttccccaggtgattctgtgcacattggtgtttgagaagccctggctgtcacatctggcctcagctcttaaagcctactcacttccttctgcaccttgaacatgtaaatcagccattctgccctgctcaccactccccgggtgttcccattcccctttgcagccctgcttgtacatactatttagatacaccaagcaaacccaatctactcttctaagtcacatttctaatgtcaattgacttgagtggctcttgaagtaaaaattaactttccagtttctcttccctcaggcccagtctgcagtggcaatcgctgttaatttttttttttttatcttctttagaattcttgtgtatatccaagcatctgaaatatacgtgttttatatttttcttttttttataaataacattgtaccagacaccaggcatggtgtttcacacttgtaatcccaacaatttgggaggctgaggtgggaggattgcttggggccaggagttcaagaccagcctgggcaacatactgagaacccatctccacaaatatttttttaaaaagaaagaaaaacatcacacaatatatatggctgtaaacctagtttaagttacataatttatctctaattagttcacttattattgcttaaaatattttgttctgtatatagatggatataccaaagtttatttaatcagttctcagatgataaacacttatgttattttctttctttcttccttttcttttttttttttctatttcaaacaatgcggatgtatacatttctttacaattgcatttcccacttgtgcaaattttcctttaagatctagtctcaggaaatggatctgtcaggtggaagggtatgtgccttttaacccagtaggtatcaatagatttccctccaaaggtgtggcaccattttatattccagaacagcataagaaactgtttccatcaccagaaattatcaaacttttttctttgttgactgggaagtagaatctagactgtcttaaacttatctaggaatttctctgaggcatttatgagtagacacaaagagggtggaggagaaagaggaggtgcattctaagaagaggagatacatgtaggatatatgtaaagttgggtctgtggaagtggctagagtctggagaggtaggcagacagccagatcagaagggcctggcacacctgctaaagagggaaaactggaaccgcattcccaaggaatccatgaaaatatcgtgttgagaagataaaaccaaatagtttgctttttatttccacaagtttggaggagccatctgtttcttgtcagggcattgactgataatagttgtgtctttataattgggttgttttctcctaaaactcaatttagacaaagtaagtgtcagtgtgggagggttggctaattgttaggaagcaacatttggtaaatctggaggccaaacccaaaacttttatatttttatattcctggttgtgcttactactataaagttaattataatgcttttactagaagctgtacatttgaaatcaaaacactctatcactgctactttcccttctcccagcatgaggtaacaataatattctttaggaaatttcatatggaaggttgacacctgttgtactttccttacctctctgaataaaataattccaacagaacactgacaacttttagaaatccaatttcactgtttcacttgctgatatggtttggccgtgtccccacccaaatctcaccttgaattataataatccccatgtgtcaagggtgaggccaggtggagatacttgaatcacgggggcagtttcccccatactgttctagtaagtgaataagcctcatgagatctgttggttttataaatgggagttctcctgcacaagctctcttgcctgcagccatgtaaggcgtgtcttttcttttcctttgtcttctgccatgattatgaggccttcccagtcatgtggaactgtgagtccattaaacctctttcctttataaattacccaatcttgggtatgtctttattaccagcacaaaaacggactaatacactcgttgaatataaaacagaaaaaggaatgccactttatcagagagctataatttcatttgaaacaaaacaagaaagatttattttttcagaactcagcatttttttttttttttttgagatggagtttcgctctgtcgcccaggctggagtgcggtggcaggatctcggctcactgcaagctccgcctcccgggttcaagccattctcctgcctcagcctcccgagtagctgggactacaggcgcctgccaccacgcccggctaattttttgtatttttaatagagacggggtttcactgtgttagccaggatggtctcgatctcctgacctcatgatctgcccacctcagcctcccaaagtgctgggattacaggcatgagccactgcgcctggccagaactcagcatttttatcaaacaaattccagatcctaagacatgtgtgactaaggatgtattttggggtaaatgaggaaaacaaaaatgttgagacctttacttatcttcaataatcaatgcatctccaaaatggcgctattaaatctaatcatcttggatttggttgatatttggatggtcatattgccgagctaaactcctttacctagaatattataattagaaaaaagtctgaggaatcatctaattcaggctctcagttgacaaagaatttaccttactttggtaaaaatttgtttggctttatgtggaggtttctcaaaaaactttgaataattattttctgaaataatattctaaattggaaattggaataaaagatcattcacgttcatcttgagtattcactttaagactaaagagggaagtgactttgtgatccaggtttgtgacattgtattttaaaggaggaatttatatttgatcttgggaacaatttttcacattcaaagtctgagaacatctccgtatcaaacccaaagagattttctcaagtgaaataaagtgaaacaaagaaagtagcattagcagttccgagttgcagacagttctttttaaaatttgttttttggttcttccaggcctcatttgcaagttgctacttaattaactagggtggttaatgttaggtaaagtccaaaatgtaaaggaactacatagcaataacaatatttcagtatttcttcaataaaagttactgacactctctatatgtcaagcactggagggtgccagtgaaaagagatggtctgttgctatgttctgcattttcgttggtgaaaacagagaagttggctgggtcatcagtgtggtacctctggtaaagctcaagtatagggaaatttaattcaatctcatgtttgaattattccctcttaagggggtaataatcctattcccatggagttttttgagggcactaagtgatagaacacatgtgactatgactagtataataaatgatgtattaaaatcattctataatacatataccggaaaattaattaagcatatgatacgaataaatgtatgataagtcaggtaaaatgcattaatcctaggaataaaacaaagcactggtaatctctctgaaggtcttagagcaggaagactcttgagacaggtctttataaaaaatcacttagaaattatacttaccaatgtgttcaaactacatgaactattgagttttgctttgtaggatagtggaacgagaagtgaatttggcatttggagaccttgagcctttattttctcactgcaaaatgacagagataatggggcctatcttttagagttgctatgggtctcagaaaggatcatggttttttttttttttttgagacagagtctcactctgtcgcccaggctagagtgcagtggcgtgatctcggctcgctgcaacctccgcctcccgggttcaagcgattctcctgcctctgccttctgagtagcgcaccaccatgcctagctaatttttgtattttttagtagagatggggtttcaccatgttggtcaggctggtctcaaactcctgacctcatgatctgccagccttggtctcccaaagtgttgggattacaggcgtgagccactgcacctggcctaagtaatttttttttttttttttttttttttttttttgtgggggacagagtctcgctctgtcgtccaggctggagtgcagtggtgcgatctcaggatttcactgtgttagccacctggtctcgatctcctgacctcgtgatctgcccgcttcggcctccccaagtgctgggattacaggcatgagccaccactcccggcagggatcatgtttttaaaattacttgaaaatacatatatagtcattcaagtatgaggtattattattttaacagaaatatagctacctatatcttatattaggttccttaatccacatatatctcagaatagcacctaatttgaattgtagaatagtatattgaaaagaatctttaactgttggagaaaaatttgtgtgtgtgtgtgtgtgtaggcgcacatgcatgtgtgtgaggcttgtctacttctatcgcacatatcaggtcgagaaaatgtctgtactaaattgccaagtggtttaggtaaaaattcatgggaaggtataatttaaaattctgagactctagcttgtaacatttgtaattttaaggctaaagacatgaaaatgaacttaaattcaatattccttccaacagcctatgattttataactttatgattataccatatgaccccaactgccttctatgtatggtgaatggttctaaattgaaggccctttatcttctaaactctttgatgagtttgggcatctacgtctggatataagagctgtggagagatggactactttccatactaagaagagaaaaatttggagtgttcagatctctcagggaggggatgaggagcagagatgggatggggaagggagaaaatgcgggtagaagcccacatctttaataaaatttattaaattgaaaaggtgattggtgtaggtaagtctctgttaaaaactagggacagacagacactgggtcacttgacagagtggttaggtgtagtatacatgaaaccacgatgccaggacacagaggatgatgtaagactaagtccctgataagttgcagaaggttttggacttccactgactgtggtattggtagatacctgagcaagatatctgccaacagatatctaccaatagatcgtcacctagatcttcaagggtgcaaacaggtcccaccttatacctgagttatacaagtaaaacatgtcttcatttatttataagttttaacctacctacttccaaaaggataaatgatatatttgttgtattatttattatgatggaacttttcatagcggagctaatctaggtcagtggttctcaaatgaggaggaggtcagttttgcctttggtagacaggtatcaatgtctggaaatatctttggtcatcacaactgagggtttctatggacactttgtgggtagaggcaaggaccctgctcaaaattccacaatgtctgggacagaccccacagcgaagaatatctgacccaaatgtcaatagtactgagttgagaaaccctgatgtaagccaacctctcatcttaataaatgagaagctgaacatcaaagagggtcagtgatatgtgccaaatcacacagtgaacaaacagataagtcctctagtatttttcccattacagtatttaacttctaagagctaaagttctaaaatggaactgttggaaaatagaccttcttatggacatatttagacttaaggtatactcaataattgcataaatctttaaaacatagtactgcttacagtaggatatctaggcaaagatgaacatagaaaatttaatgacaatatgtatttaactatatacagtaaaaaccatttttataatatttaaccaaattacttcccagcacagtggttctcagacttcagcatgcctcacagtcacctggaggaaaggcttacacaaacacagattgccaggacccatccctagagcttctgactcagtaagtctgtcatgaggcccgaaaacatgcattcctagcaagttcccaggtagtactgatgttgctggttaggagaccccactttgaaaaccactgtcctagaatttagtaggtacttagtaaattttggcttaatattgtaaatattcaaacaatataatctcaccaaaaaatgtaatctcactttaacatagattagttaataatgttaattcccatttagaggaatacaaagatatatatggtagaatcaaaactaatttaaacctcatttaattcaaattccccattttaaaatgaaaaaattaatatattttaagcttattacaacaaagaagaatcccttttagcaatagccaaaagaaacaatattaaatgcaaatcaattatagacaatttgaacactgacattgttatctgaaagatatataaactcaaagattataagtacaattaagtatgtatccatcattttttaacttatgaggaatagtctgaatgccaaactgagtaaaacctggtctgatggggctcttatctcaagctatgtctagggaaaatgcctattgacttcagtaatataaaatcaggccccgagggaccataattgtctctttaaattatttgggaaatcatgtacatgtttaatcaactaaatacagcatacaattgtaagtggtatattttcatcataaataatcaatgtgctgctgttaatatggttaatagaatgaaaagtaccttcaggggaatttattttacgatcactcattttcattcctttaatttaatttttaaaatgcaagaaattttagatactttaaaactacctgtttacctagaaagtatgtgctaagtaacctgcctaatgccagtcatcactgagagacaccaaaacaaatgattgatagttaactttccattttgctctttgagatcacgtagacagtttatgcagactttactttcctaactcatgtcatcctgtccaaggtactgaacttcacttgccaaggacacacaggaagataaaccctctcaaatgtgctacatttgtcttcaactttttaaatatccatctattttttagattagatgccatctgttgtattatcatatctggttaaatcttattaaaattcctggccaatatatcactctgctgcggcaatcttaccctgctacctctctaggcttttctgcagcattcaataaagagcctgctattttaactaattgctgaggcaggacacagtgtgagagtctaaaacagaatcagcgctatattgtttctacttttacccatagagtgaacaactgttcatatcaaacctggaatcatcccttcaagtctcctaaacacagcacagtttgagccaatgcagttaatccaccctccttcagtgctagtgtcgaatggcgcttttgctgcagtattcaccttgaaactaagtaggcaggattcattatttgttgaagtcacctaactgccagtttattcttatacgatcacaaacaatcacaacagaagacaaatacaggcatatatataactcacttacaagggaagcaaatttgcagccagagacaagggcaacgtaacagccaagaactgcagtaaatctctttgagctaatagccacctctaataatgctctcctacaacacctccaatcaaataaattgtattcagagtttaaatatcaaatcaacattcattccttgatggttacagatgatgtccgataagcaaatttgaatttatgatttatttactccttaagtgtctcaaagccaggattactggaagacttactatgcttattcaagcatgctgacagaactgtaatctcagtaatttctccctgcacctctcagcatgactgacaggcatctgccaagactgtagtacataaactgctgaaacatgcaaaaatatttacccccaaaagatgtagtaaaagctcagcttcctccagcttccataacccctgaagtgttaatctggaggaacagttccatgagtttccacaggccagcagtgtgtctcctacactt

SEQ ID NO: 3 - DNA, 123 bp, Homo sapiens
  source 1..123: mol_type = genomic DNA
gtttcattggtcagtttaacagcaaatgccttgggttactcagaacttggagccatcaaatctctcaggacactaagagctctgagacctctaagagccttatctcgatttgaagggatgagg

SEQ ID NO: 4 - DNA, 6965 bp, Homo sapiens
  source 1..6965: mol_type = genomic DNA
gtaagaaaaatgaaagaacctgaagtattgtatatagccaaaattaaactaaattaaatttagaaaaaggaaaatctatgcatgcaaaaggaatggcaaattcttgcaaaattgctactttattgttttatctgttgcatatttacttctaggtgatatgcaagagaaataggcctctcttgaaatgatataatatcatttatctgctgtgcttatttaaatgactttatttcctaatccatcttgggagtttccttacaaatctatatacaaaaaaaagctgatgcattattaaagtactatgtgtaatgatataatggtaatctaaagtaaattctatatcaggtacttattctttgtgatgatatactgtacttaacgagttttcctgaaaataatgtgaatcacacatgtgcctaagtatgagtgttaagaaaaaaatgaaaggagttgttaaaacttttgtctgtataatgccaaagtttgcattatttgaatatattcaagattagatggttagatattaagtgttgactgaatttataaaactagtaatactaacttaaagattacatacaaatccacatcatttttataacaataaagtaaaacacttataatgaacagaaaatataattttgactcattactataggtaatttatacattaaccttaacttgcatcttattggtcagagtcacacaaaatgttattttatccttttcaaagatgcaataatcattttccatcatgcataacagattagaaattttgccattattgacttattttccatgcctttttttacggcatgaagcattagtttatagatatataatataaaaaattagttctgcttttttttaaaaaaaaatattatcaaaacaaaacactgaattgtgtgattccaatagaaaaacactgctctttcacctcctaaggtgtagttacttttatggaaactaagctgtattgtagacttccatttgcactttgtagattgtttatagccttatgttctcttctcaagtcttattataaatgtcactttgtaagaacgtaggacttgtcttcgatttccctaacatatatgaaaactttgtcctcattatcgacaactcagaacaatataatacaagtagtcctcttttatttctcacagagagcctcaaattttcaccaaaatgttaacagaaattatctctggggtgtataagaattaagtctgttttccaattaaatgtcactttgttttgtttcagactggcagtttcagttctggagaaaaaaaatgtcatttgtgtacattctacttgaaaacatgttgcctgaatcaaaataatatattttatatggcttgtgaaatctgaacaatgctaaacatttgaaaatattataaaccttttacatttgaccatttgaaagtttattaaattcattggtcaagtgctcagatatttccatacattacacttcatttctataaaaaagctgatcttatcggtatacttttaattttctcagaaataaccatatctataattattaatcaataatgccttttatattaaaagaggttagtttttgaaacttggagttttagacataaaatccttataaatgctgatagtgatataactaatagtttaaatggtcagatttatgaatatggctctattcctcataatgacaacatacacacagcactaaaatgactaatctcttcaatacgtgtttggcattgtagagtcaaaataacgttataattgattctattttttatacttctagtgtttggatattttattttgtaaaaatataatcatgaatgatggtgaggttggatataagaatgatgattatgattgggaagtgagatttgaacatgctcagaaactctcatttaattctttgccctagcagcataaaatcacaatagctgcgtcaaagcgtaactcaggcactcattttatttttgttgttctgttattttttcaaagcatgtgcttttatgcaacattactgaataaagcatgttgtacagtgcttgataagaagttagaaagtaacaaataaattatcatcacgttgcactttgtgttttgcatgttttatgcacatttctggctgacagcttttaaacatttattgtatttcaaatttccagtccaaatttttcaacttgtaaaattaaactgagtgaattgatgtcgtgaatatctagggtaaaataaaatttgtgtttaaatttgtatttttaatttcctaacctaggaaatcttaaataccttctttttcaaaagaactcaagtcttaatggatagggaaacagacggagagcatcatgaacaaaaagtaacaccaaatgttctgtcatatcagatttctaactaataacaaactatatatttctattttgtataggataatcttgctccaacttggatggggtggagcgctggttcctcccctgagccctttattatgggtactgtattaccccttttgctacctttaatccttgcactgtgacttatgtgtagtggggtgagggagggattgggaagggtactattattgcaccacagtagggaaaatacattatttacatcctaatcccctcttttcaattgtcttaaatttcatttgaaaaaaaaaaaaacctttatgaatttaccctctgtggattttaaccccaatggttgatatctttattaagtttcattgaatatgatttagttatgtgtatatggagttatccatctttggggagattactggattggtgagggcgggggaccctggtgtagaatgattatgtgaaaaaacaatttaacttgttaagctcatgatactgtttgaggcatacagcccctgctgtttagtacattggtctgggtcctgaaaattaccagttagataccatcagttgattattgatatgtatgagcagatactagggtgcaatatttcaggtttcataagactggtattgattgtgaccactctcattttttattgtgtaagttcatatggggttattttcaaaatgttaacaaggcaaaaatatattaagaaatagttgaataagcacatgtgaattgtgttgtaaacaaaaagttagaataaaaaaatccacttatttgaattatgcagaatagaatacatacctagaaataaaacaaaaacgtcttatcatgagtattaagataaaatttaaggcataaactcacttcttagaataagtaactcccaactaactttctaggattttaaaacataacacagtgaaaacatacataaacataactctacattttatttattcttaaagtttaagtgtattatacaagaagaagagtttatattcgagagacagaaaaagtcagaatttttgtttggatcaccaatatatcatagcttacaaaaaaactgtcttaattaaaacccacaacataatttttttagatttttaagaaagattctattattcttctttatacttaaaaatggatgattcctactttgcccacttttatttttattcacatagattttctttatttctattagagaagcactagaattcatgaatagtgttgatttgaagttcaaagtaattaattcagataaaaagacatttctgcatgtatgaaaatttctaatgtgaatttgcatatttaattatcaatccttcatttagtgtagacttatttttaaaaatgcaggtaatgaaccagaaatagaattggttgtgctagagtagagaaactttatttgatgattgttttgaaaaaaaagcttctgagaagaaacaacctctagtacagtattaattcattaagatagctcctttctcagacatttcctttcatgtagcctgaaagttcaatttgaaatttgttctttccaatttattcagactaattctgcctactttcttccccccataagaaccaattactgcagctttattgagactgaaaaaagttaatacacctccttctttgctgaaccaaggaatggcttggaactcttgggaaaagacaatcttttctatgatctttcattgtctaatttaatacatcataaatatgactatagctttgtataataaactccccaatactgtgccagatgttttctaagataaagttattttatgttcacaaaaaaaataaaacttttctctgggccaaatgtatgccaactttgcaaatcatatcctgaagtgcactgctgcagagtacatgcttgcgtcataaattccatagagttcgctttaactctaaatcaatccccagtttcaaagtaaacctctcaaacatattacctaagcacaaacttctccctgtgctcagttccttaattattctcatcccatattcagaaataacatttaaaaattatgctttgatcaataaatactaatctaaactttgcttcattaacccattcatttttgtcaaccattattttattcctatattcaaagctctctggtatgttcttatattcaagacactcaaggccctggaagattcacgaacatatgtttgcatcttaaatttttagaaaatcttacaatctgtcaggattacactgaactctagtacagagtaatatgggtaccagataagtgggagcaactcttccacgtagactggaaacagcactaaatgctatttataggctactttctgaacttaacttgttttaacctcatttttctcatatgccaaatgagaacgcaatactgaattatctgtacagttctgttcagtactagaattctgattcttgaattcaaaggggaaaacattcctctttattttggaggctaaactgggggacaaagttaggctccatgaaagaagtgctatttgaactaaagcctttaagaggggagagtatttcagaagaggagctattagacaaggaatttcaatgtaaatggcatctcaatcacctggcaattatattagcacacggttattatattaattgaagtggcatgaagtatagatgaccagggaagttaaaactggaaatatagattgtggagtgatgtgaataccaaggtaagaaaaatatttgttagttaccagagagccaataaataactttcaagtgggacttggggaagattaattcatcttacatagattaaatgaaggagaaggttaggagacagatgacagtgcaagtatgaaataacagagggcagttctaggtggtgactgtgagaatggaaaagaggtggcaaagctgagaaacgtttcaaagaaaaaatgtgagacaggtaatgtgaaaagaaaatcgagaaataggtatagataatcagtgttctgctcatactctaaattgggtgttgaaggcaaaatacgtattttaattagtactctgtgtatacacactagaaacagcattgtaatctggatagtggacaaaatattcagaaaagaagggaaatagtaacttgatttcaatttccaaatctctaatctgaaagaaatctaattctattcatccatttaaaataaattatataacgagaatttatgaagtccattgtattaatgcagacagtcagatgagataaggcaaagtgtcacgtgtcagcttggtagttgcatcggccacatcatttggttctgcctggataactcaaccaaattaatttttcatactcatcccctccacctttgtcattactggtattcttattttctttggcccacttatcacactgttttatgttccccagaaggcctagagttctttacaggctttaaacagggatcagaagtataagaaattggctcatgtatttttttttcagacaggcagttaaaaaaaattgttctaaaaatacactggcatcaaatggcaaatagaagatgttttgacgactacttccattggatcagactgacaagaataatacaagcacataggtggaattaaacttagctattaatgtccaagtttgaggcagctgccccttataagcattttagggtctgtttttagcttccctcttagccactcctgtgcagctccagtgggaggtatggaggaaaaagcaaggaagccatccctatgttgtttccaaacatgaacactcaagatttttaactagtggtccagaagtaaagagggggaaaacatccttctatagaaaaaaaaaaaagtagataataattgaacacagaacttcatgtgatcacatcagatttgagaactatgtatggcatccctctttttcttattttcctaagaaatgatttctattatgtttcatttgaaataagttttttgaattaaactcagtaaatgaaacaactgacatgactggagcttgaaataaacgatgtgatgatctaatgaaatacataatgcaaattgtcttgcttcttatgcaaaaattattagtcatagcaatgcatgaataattaaagacaattatattaggtatttaataatattttttatatttatcatctgaatttttaagttattttaaaaatatattggtcaaatcaactcaggtccaaatgttttagttttgttctttaatatattgcctttttaaaatgagttaaacttctgtataggctttttaacttttctttattctgataacacaattctgacttcatctggcagcaagttcctctgattttccttttcctttaaccttttaatgcttctccctcccttttttttaaaaacatttttgtttcatttcttggttatattgcctatagttgttttcctaagtgtattgcttaagaaaaaaaaatgaattttaagatttttttgaaccttgcttttacatatcctagaataaatagcattgatagaaaaaaagaatggaaagaccagagattactaggggaattttttttctttattaacagataagaattctgacttttctttttttccatttgtgtattag

SEQ ID NO: 5 - DNA, 282 bp, Homo sapiens
  source 1..282: mol_type = genomic DNA
gtggttgtgaatgcccttttaggagcaattccatccatcatgaatgtgcttctggtttgtcttatattctggctaattttcagcatcatgggcgtaaatttgtttgctggcaaattctaccactgtattaacaccacaactggtgacaggtttgacatcgaagacgtgaataatcatactgattgcctaaaactaatagaaagaaatgagactgctcgatggaaaaatgtgaaagtaaactttgataatgtaggatttgggtatctctctttgcttcaagtt

SEQ ID NO: 6 - DNA, 64 bp, Homo sapiens
  source 1..64: mol_type = genomic DNA
gataatcttgctccaacttggatggggtggagcgctggttcctcccctgagccctttattatgg

SEQ ID NO: 7 - RNA, 123 nt, Homo sapiens
  source 1..123: mol_type = genomic RNA
gtttcattggtcagtttaacagcaaatgccttgggttactcagaacttggagccatcaaatctctcaggacactaagagctctgagacctctaagagccttatctcgatttgaagggatgagg

SEQ ID NO: 8 - RNA, 6965 nt, Homo sapiens
  source 1..6965: mol_type = genomic RNA
gtaagaaaaatgaaagaacctgaagtattgtatatagccaaaattaaactaaattaaatttagaaaaaggaaaatctatgcatgcaaaaggaatggcaaattcttgcaaaattgctactttattgttttatctgttgcatatttacttctaggtgatatgcaagagaaataggcctctcttgaaatgatataatatcatttatctgctgtgcttatttaaatgactttatttcctaatccatcttgggagtttccttacaaatctatatacaaaaaaaagctgatgcattattaaagtactatgtgtaatgatataatggtaatctaaagtaaattctatatcaggtacttattctttgtgatgatatactgtacttaacgagttttcctgaaaataatgtgaatcacacatgtgcctaagtatgagtgttaagaaaaaaatgaaaggagttgttaaaacttttgtctgtataatgccaaagtttgcattatttgaatatattcaagattagatggttagatattaagtgttgactgaatttataaaactagtaatactaacttaaagattacatacaaatccacatcatttttataacaataaagtaaaacacttataatgaacagaaaatataattttgactcattactataggtaatttatacattaaccttaacttgcatcttattggtcagagtcacacaaaatgttattttatccttttcaaagatgcaataatcattttccatcatgcataacagattagaaattttgccattattgacttattttccatgcctttttttacggcatgaagcattagtttatagatatataatataaaaaattagttctgcttttttttaaaaaaaaatattatcaaaacaaaacactgaattgtgtgattccaatagaaaaacactgctctttcacctcctaaggtgtagttacttttatggaaactaagctgtattgtagacttccatttgcactttgtagattgtttatagccttatgttctcttctcaagtcttattataaatgtcactttgtaagaacgtaggacttgtcttcgatttccctaacatatatgaaaactttgtcctcattatcgacaactcagaacaatataatacaagtagtcctcttttatttctcacagagagcctcaaattttcaccaaaatgttaacagaaattatctctggggtgtataagaattaagtctgttttccaattaaatgtcactttgttttgtttcagactggcagtttcagttctggagaaaaaaaatgtcatttgtgtacattctacttgaaaacatgttgcctgaatcaaaataatatattttatatggcttgtgaaatctgaacaatgctaaacatttgaaaatattataaaccttttacatttgaccatttgaaagtttattaaattcattggtcaagtgctcagatatttccatacattacacttcatttctataaaaaagctgatcttatcggtatacttttaattttctcagaaataaccatatctataattattaatcaataatgccttttatattaaaagaggttagtttttgaaacttggagttttagacataaaatccttataaatgctgatagtgatataactaatagtttaaatggtcagatttatgaatatggctctattcctcataatgacaacatacacacagcactaaaatgactaatctcttcaatacgtgtttggcattgtagagtcaaaataacgttataattgattctattttttatacttctagtgtttggatattttattttgtaaaaatataatcatgaatgatggtgaggttggatataagaatgatgattatgattgggaagtgagatttgaacatgctcagaaactctcatttaattctttgccctagcagcataaaatcacaatagctgcgtcaaagcgtaactcaggcactcattttatttttgttgttctgttattttttcaaagcatgtgcttttatgcaacattactgaataaagcatgttgtacagtgcttgataagaagttagaaagtaacaaataaattatcatcacgttgcactttgtgttttgcatgttttatgcacatttctggctgacagcttttaaacatttattgtatttcaaatttccagtccaaatttttcaacttgtaaaattaaactgagtgaattgatgtcgtgaatatctagggtaaaataaaatttgtgtttaaatttgtatttttaatttcctaacctaggaaatcttaaataccttctttttcaaaagaactcaagtcttaatggatagggaaacagacggagagcatcatgaacaaaaagtaacaccaaatgttctgtcatatcagatttctaactaataacaaactatatatttctattttgtataggataatcttgctccaacttggatggggtggagcgctggttcctcccctgagccctttattatgggtactgtattaccccttttgctacctttaatccttgcactgtgacttatgtgtagtggggtgagggagggattgggaagggtactattattgcaccacagtagggaaaatacattatttacatcctaatcccctcttttcaattgtcttaaatttcatttgaaaaaaaaaaaaacctttatgaatttaccctctgtggattttaaccccaatggttgatatctttattaagtttcattgaatatgatttagttatgtgtatatggagttatccatctttggggagattactggattggtgagggcgggggaccctggtgtagaatgattatgtgaaaaaacaatttaacttgttaagctcatgatactgtttgaggcatacagcccctgctgtttagtacattggtctgggtcctgaaaattaccagttagataccatcagttgattattgatatgtatgagcagatactagggtgcaatatttcaggtttcataagactggtattgattgtgaccactctcattttttattgtgtaagttcatatggggttattttcaaaatgttaacaaggcaaaaatatattaagaaatagttgaataagcacatgtgaattgtgttgtaaacaaaaagttagaataaaaaaatccacttatttgaattatgcagaatagaatacatacctagaaataaaacaaaaacgtcttatcatgagtattaagataaaatttaaggcataaactcacttcttagaataagtaactcccaactaactttctaggattttaaaacataacacagtgaaaacatacataaacataactctacattttatttattcttaaagtttaagtgtattatacaagaagaagagtttatattcgagagacagaaaaagtcagaatttttgtttggatcaccaatatatcatagcttacaaaaaaactgtcttaattaaaacccacaacataatttttttagatttttaagaaagattctattattcttctttatacttaaaaatggatgattcctactttgcccacttttatttttattcacatagattttctttatttctattagagaagcactagaattcatgaatagtgttgatttgaagttcaaagtaattaattcagataaaaagacatttctgcatgtatgaaaatttctaatgtgaatttgcatatttaattatcaatccttcatttagtgtagacttatttttaaaaatgcaggtaatgaaccagaaatagaattggttgtgctagagtagagaaactttatttgatgattgttttgaaaaaaaagcttctgagaagaaacaacctctagtacagtattaattcattaagatagctcctttctcagacatttcctttcatgtagcctgaaagttcaatttgaaatttgttctttccaatttattcagactaattctgcctactttcttccccccataagaaccaattactgcagctttattgagactgaaaaaagttaatacacctccttctttgctgaaccaaggaatggcttggaactcttgggaaaagacaatcttttctatgatctttcattgtctaatttaatacatcataaatatgactatagctttgtataataaactccccaatactgtgccagatgttttctaagataaagttattttatgttcacaaaaaaaataaaacttttctctgggccaaatgtatgccaactttgcaaatcatatcctgaagtgcactgctgcagagtacatgcttgcgtcataaattccatagagttcgctttaactctaaatcaatccccagtttcaaagtaaacctctcaaacatattacctaagcacaaacttctccctgtgctcagttccttaattattctcatcccatattcagaaataacatttaaaaattatgctttgatcaataaatactaatctaaactttgcttcattaacccattcatttttgtcaaccattattttattcctatattcaaagctctctggtatgttcttatattcaagacactcaaggccctggaagattcacgaacatatgtttgcatcttaaatttttagaaaatcttacaatctgtcaggattacactgaactctagtacagagtaatatgggtaccagataagtgggagcaactcttccacgtagactggaaacagcactaaatgctatttataggctactttctgaacttaacttgttttaacctcatttttctcatatgccaaatgagaacgcaatactgaattatctgtacagttctgttcagtactagaattctgattcttgaattcaaaggggaaaacattcctctttattttggaggctaaactgggggacaaagttaggctccatgaaagaagtgctatttgaactaaagcctttaagaggggagagtatttcagaagaggagctattagacaaggaatttcaatgtaaatggcatctcaatcacctggcaattatattagcacacggttattatattaattgaagtggcatgaagtatagatgaccagggaagttaaaactggaaatatagattgtggagtgatgtgaataccaaggtaagaaaaatatttgttagttaccagagagccaataaataactttcaagtgggacttggggaagattaattcatcttacatagattaaatgaaggagaaggttaggagacagatgacagtgcaagtatgaaataacagagggcagttctaggtggtgactgtgagaatggaaaagaggtggcaaagctgagaaacgtttcaaagaaaaaatgtgagacaggtaatgtgaaaagaaaatcgagaaataggtatagataatcagtgttctgctcatactctaaattgggtgttgaaggcaaaatacgtattttaattagtactctgtgtatacacactagaaacagcattgtaatctggatagtggacaaaatattcagaaaagaagggaaatagtaacttgatttcaatttccaaatctctaatctgaaagaaatctaattctattcatccatttaaaataaattatataacgagaatttatgaagtccattgtattaatgcagacagtcagatgagataaggcaaagtgtcacgtgtcagcttggtagttgcatcggccacatcatttggttctgcctggataactcaaccaaattaatttttcatactcatcccctccacctttgtcattactggtattcttattttctttggcccacttatcacactgttttatgttccccagaaggcctagagttctttacaggctttaaacagggatcagaagtataagaaattggctcatgtatttttttttcagacaggcagttaaaaaaaattgttctaaaaatacactggcatcaaatggcaaatagaagatgttttgacgactacttccattggatcagactgacaagaataatacaagcacataggtggaattaaacttagctattaatgtccaagtttgaggcagctgccccttataagcattttagggtctgtttttagcttccctcttagccactcctgtgcagctccagtgggaggtatggaggaaaaagcaaggaagccatccctatgttgtttccaaacatgaacactcaagatttttaactagtggtccagaagtaaagagggggaaaacatccttctatagaaaaaaaaaaaagtagataataattgaacacagaacttcatgtgatcacatcagatttgagaactatgtatggcatccctctttttcttattttcctaagaaatgatttctattatgtttcatttgaaataagttttttgaattaaactcagtaaatgaaacaactgacatgactggagcttgaaataaacgatgtgatgatctaatgaaatacataatgcaaattgtcttgcttcttatgcaaaaattattagtcatagcaatgcatgaataattaaagacaattatattaggtatttaataatattttttatatttatcatctgaatttttaagttattttaaaaatatattggtcaaatcaactcaggtccaaatgttttagttttgttctttaatatattgcctttttaaaatgagttaaacttctgtataggctttttaacttttctttattctgataacacaattctgacttcatctggcagcaagttcctctgattttccttttcctttaaccttttaatgcttctccctcccttttttttaaaaacatttttgtttcatttcttggttatattgcctatagttgttttcctaagtgtattgcttaagaaaaaaaaatgaattttaagatttttttgaaccttgcttttacatatcctagaataaatagcattgatagaaaaaaagaatggaaagaccagagattactaggggaattttttttctttattaacagataagaattctgacttttctttttttccatttgtgtattag

SEQ ID NO: 9 - RNA, 282 nt, Homo sapiens
  source 1..282: mol_type = genomic RNA
gtggttgtgaatgcccttttaggagcaattccatccatcatgaatgtgcttctggtttgtcttatattctggctaattttcagcatcatgggcgtaaatttgtttgctggcaaattctaccactgtattaacaccacaactggtgacaggtttgacatcgaagacgtgaataatcatactgattgcctaaaactaatagaaagaaatgagactgctcgatggaaaaatgtgaaagtaaactttgataatgtaggatttgggtatctctctttgcttcaagtt

SEQ ID NO: 10 - RNA, 64 nt, Homo sapiens
  source 1..64: mol_type = genomic RNA
gataatcttgctccaacttggatggggtggagcgctggttcctcccctgagccctttattatgg

SEQ ID NO: 11 - DNA, 170057 bp, Mus musculus
  source 1..170057: mol_type = genomic DNA
taaaataaaaaattaattttattagatttgcacattttttaattgtgattagcatcattttgggctaatagtagcattttccaacatgcagttcatgaatacggtttgcctaaatattttttttttaagaaaaagaggtgcctacggtctgcttctgtaagaaacacaaatatcttgatgtaattgactatataagtgtaatcctctctgattttgaggaaaagaaattctgaagcccacatttatatttagaacaatctaaagaagcatgatttcaaagcaaagaaaaataaacagaaattggggaaataaagaaaaaaatgagaaaaaaaagcactctggtcatctgttagcacaaacactacaataaatataaatcaaatgttataccttttccaattgcaaatcataatttggatgtgaagttgtgagtgtattttgccccttaaaattatgaaataatccaaaattaacaattgtaataaaaaagcagagatctaccactacccagtcatagtttcatttcttagttagcaaatatcttccatgaaaaactgctgtggacagaaagtaagaaaagtgattgtgatatcaacctgaagataatttcctcttcatatgtacataatgctgaaaagtaaaagaaagtgactttgtacagtatttatatttgcttataaaactctaaacatgtttttaacaggttaagcagtagtgttgtcttttgaacacgtatgtacagtctggctatacattgaacgttatccacttaaattttaaaaacaacccaaacattgttaaagtgctgcaaactattgcttaatgacttaaagaaatgaagtctgctgaacagtttccttgacttagccactgacctatggtttctcgtgagtgagattctgagtgctgagagaaactagataccgcaacgtggtaatatcgacatgcattggcagcatccacactatctacaatggtacagagtacagtatatttccggtggacagcttgcactctacatttctcgtggtacatatttgatgcaataaatactgtgcttacgtcattatttgtttgctcaaacgtgcaccacagagtaaaatgactatttacataataaatagcatttcattaacacatacagtgtcaaccttgctgagagctgaagatggctaaacaaagtgcaggaggaagcggggatttataaagggttcttttggtcaattcgctctgctagggttgggggtagggagtcagagtcataatttagagacctttcagagacagtgaacagaaatgtagcgtgactccagacatttgaatgaagtttgcacctcctaagacttgatgacctgtctgaacaatctccttggactaaggactagattttgacaaacccagctcagcaaagcccacgatctagcgatcacctccgtaccgccccctccccccgcagaaacacagatgacatagaactgttgaagaactgtctttgctttcctttcgactttttctcatgcatgatcctaaggtgcaacatgccctcatgcgaaaccacaccgttgtgcagacgggagggccataaggatgtcaacactcccaggtgacacaccgggaaaagagttcctttagtctatttcccaacagaaaccctgcttacaaaaatagtcacatgtaacaaacaacacatggattaaaaaaaagatgaatccactaacagagtttgtaaaaaacctgacaaatgtggcagttgaaatgcaaacggtggatagagttactacactaaagtgtttcacattaacccccaaattatagctctgcacccctttagactgatccctacagtctgcatagccatttgtctcttgtcttcagcagtgtcagctggtagttagaacagtaccctcctgtcaaggttatctcccctttacacagtcacagagtttgccgacaagggggtcactgtcttattgaggcactgaccttaaagtgaatttgtgtaaaaacagtcagtttggcattgacttcttaaaggagtccttttgacttcacaggctgtaaacaatttgtcacccaatttattatttttttttgttgtttttgttcatttccctttggctttttcatccttcccttcctgctcgtgtttctccacgattggctttgtcacccgatcgtaggagggcggacaagctgctgtggacattgtcaggtcagttttctccgtaatagagttttcgtttattctgtcaatgagcatgtcttcttttacaagaagattagccccacctttgagtttgttcttattgtatgtgaatgaagcttgttttactgttcgcttcaaaaggtggcgcctataagctcgctgaatgataacagctgacacctcctcttgtttgcgttttaatgtagtagtgatgggctgataagagaccttggaggggttggaagccatgaaccgctcttccatctggattcgaagagcatccatctctccactctcacccaacacccgctttgtaaaagcaaataagatgtccaggcagtggatgcggtctccactcaccatgggcaggtccatggcaatgagctgaagtttgtttggttgtggcaaattgagagggggttctagagcagctgcaaactgagataatttttcaaattccatgaactgggtggcgtcagggtcgaacttctcccagacctcgtagaacatctcaaagtcgtcctcactcagaggctctgcactttcttctgtggcaacgctgaagttctccaggatgacagcaatgtacatgttcaccacaaccaggaaggatatgatgatgtagctgacaaaaaagaaaatccccacagatgggttcccacagtctcccttcaccgagcttccagggttaactttattagggtcacagtcagggggtttgctgttgaggatgggggccagcagtccatcccagcccgcagaggtggtgatttggaacaggcagatcatgctgttgccgaaggtctcaaagttgaacatgtcatcaatcccaacttccctcttaacataggcaaagttggacatcccaaagatggcgtagatgaacatgacgagaaaaagcaggaggccgatgttaaacagcgcaggaagggacatcatcagagcaaagagcagcgtgcggatccccttggcacctttgatcaggcgtaggattcgtccaatcctggccaggcggatgactcggaacagggtaggagacacaaaatacttttctattagctccgcaagaaacatccctgtgggaagataattaaactatcaatcagtgaagaagtcatcaactaatcatttattaaaatatttgagttattaaagttccaatgtcaatttcagagtattaagattcaattttgtaatcttgggtatggtacaaatatattccaatcattttccagtatctgcagctgatttgtcccaggatgcacctctcctccttagaacatcaaaattcaaggactgaaagccctttatatcatatggcagcacatttgcatacaatttgtctataccattttattgaaagttttgaattatatttaaaatgttcatcacatttaacaatgaaagtaccatgtgaagagttgctgtgatattccagaaatccaatcctaactaaacaacaacaacaacaacaacaacaaaaaccaagtaaggctgagtggaggtggatcccagtactcaaaggcagagggaggggatctctgttagtgtgatggtagcctggtctacagaacgagtttcaggacagccaaggctacatagaggaaccctgacttgaaaaaccaaaccaaattaaaaccaaccaaccaaccaaccaaccaaccaaccaaccaaccaacaagaaaacaaacaaacaaacaaacaaacaaaaacaaaaaatccaaaacagaacagttgctaccgttcattatattaaaaatggtcaggagaggagcatggttcttaaaaatacttttgatctgtgtttgaattttcagatatttaatacatacatatggaaaactgagtgtttatagaattatacgatgtataataaaagttaactttagcttttactcagcctcagcaatagattaaaatttaagaatcatagtacagctcgcccccccaagagcatttatttatttatttatttatttatttatttatttatttatttttggtttttcgagacagggtttttctgtgtagctctagctgtcctggaactcagtctagaccaggctggcctagaactcagaaatctgcctgcctctgcctcccaagtgctgggattaaaggcatgtaccaccacgcctggcccgaagagtattgatatgctatggttaacttaaaatctcatcagaaataaatacgaaaatttgcttcaatgtcaacagccaacaatatatgaatatgatgttttttctctaaacttgttgaaccaaacttttctttttcacacttcactaatctgaagtcttggagtgtttcatgctgttttcatcctcatatgaactaatattattacagaattgtccgtgcatgtgcctgtgtgtttgcaaaacactccagggttgatgttcttttcctctcctgtagcaaaatctcaattttttaatttttacagctttttttctccctgtgattttgggttttttggcacatgtatgttcatgtggcatgtgctctctctctctctctctctctctctctctctctctctctctctcgtgagtgtgtgtgtgtgtgtgtgtgtgtgtgtgtgtgtgtgtgtgtgtgtgtcttacctgaggctgatgctgggagtctctttgattgctttctactttatgtatttattttcaatttttaaaatttttattggttattttatttatttacatttcaaatgttatcccccttctcattttcccctcccaaaccccctgcctctataagggtgttcccccaccatcccatcaactcccacctcagggccctagcatttcttttgcggggtcatcgagccatcacaggaccaagggcctccctttccattgatgaatgacaaggccatcctctgctacatatgtggctggagccatgctccatgtgtactctttggttggtggtttaggccctgggagctctgggagctttgggagctctggttggttgatattgttgttcctcctgtggggttgcaaaccccttcagctccttcagtccttgccctaactcctccattgcagtctctgtgctcaggacttctcaattgaacacagagctctctggtagcttgccagataatttgaggggttccaagagccttctttataaggtgtcacccttggccaggatttacactggtgctgggaatctgttctctcgttctcaagcttgcacactaagtgctttagatgccactgcatttctcagctcccccctctgtcctttaaataaagactccattaaagagtacttccaacacaaacacacacacacaccaccaccaccaccaccaccactaccatcaccaccactatcaccaccaccaccatcatcaccaccaccaccatcaccaccaccactgccaacagcaataacaacaacaaaaacctacctattcaaccaaccaaaatacccaaatgcatcattgtatgcaaagcacaaaagcatcattctctttagtcagccttctctatctcagtctctatctctgtctctttcggcctctctctttttgatgctatttacatgattattgttggaattaaaaattacatataacatatgggttggattttagatgtaaggcctatttattcagaggggggaatagcacacagatcattccaactgagtcctatgcttgaaaatttgcaatgatttcatcttaattaggaatgaagttcccatacagggacttcttcacttctctgaagcattgttggtatctgcagtgagatgagttaccttcatgaggctcttatgtactacacaatttgtaggataggactaagaaagagatgttccatgctaccagtttccttctggaaatattgaaaatttctgtatgaaagccacaagaaactactgttagtctacttgcatttcccatttacttctatccatgttctactctgcatgctggtgaccccattaactacatctctaatgtaatgtctttcctgaccttcagaccagattctcagtacccctcttaccagaatcatctagatcagtggatctaaaccttcctaatgctgcaaccctttaatacagtttctcatattgtggtgaccaccaatcataaagttattttgttgcttcttaataattgtaactttgctactgctatgaatcttaatgcaaatacctatgatttctaatggtcttaggtgacccctatgaaagggctattcaatccccaaagtgttgcgacctacagattgagaatcattgatctggatagcgtatagagtgtttaatctcaaccacctaaaagcactttttaaattttggttcaccacatcaatctatttaatatatctcaataaaggagatcttattaatggtcaaataaatatgtgatgcaatgggataaaatatttgtataaattagaagcctaattttggaagaaaaacaaatacaactcaaaaacacatgccaacatattgactttgagtagtgagatgccttccactctaaattcctgttttcaacctccacttttatcaggaggaatttgccagactttgcacagatcttacctacaatggagaggatgaccaccacaaaatcgaaaatgttccatccaatggtgaaataataatggcggagcgagatgagcttgagcacacactcgccggtgaacaggacgatgaacaccaggttgatgcgtgacaaaatgcttgtcacataatcgctctggtcatccgtttccaccatcatggtcaccatgttcagacagatgaggatcatgatgctgatatcaaacacttgtctggttacaaagtcaaaaaccattccttgaaatttgttctgcagagaaacaaagacactttcagcaatgcgggagattcctggtagacagcatatacattaaatacttcctatattccctactttctagtattgtacatagtacctacctattgggacaaatatttgtaattggtgccttgtagaacatttttatatctagttaattaaatttttgttttgaggcatgcatattcctgaatacatcaatcccttgctgtagattctttccctgcacactctttacagaaacacacagtgaatttcaacacatcaaggttacagaactgtaagaaatctgtttgatttgctgttgccaaactttggctcactggctgtagtactttccaatgagcagctagacaatgtggtcatttataaacgtaataaatattagtcttaaatttgctttgttcctagagaattatcaaaggaaccttgtgatttcaaggatgcatctgaaacaccaaacatttacattcctgctgggcaagtagcacttggggggtagaggcaggtggatttctgagccagcctggtctacaaagggaattccaggtcagtcagggctacacagagagaccctgtctcaaagagtaaaataaaataaaataaaataaatttacatttcaccttgacaacattaatttgttcccagcaagtggtctttgctgatattgtcagacaaataatgatgagtctccacaggggtaatcagactgaaaagacattgcttgctatgctataacaaagggagcacatgtccttcgctactcatgtgtagtcagctgaggttaggcccagtacaccatcttctgcttatttctttgggccactgaagaatcctaagcatattttagtaccataaaatacccctgctgtgcagtacttgacttgtgtagcactaagtatcaatggggaaaatgttctcattagacactttgcctcttcttagaactgggaacaaaacacccatggaaggagttacagagacaaagtttggagctgtgacgaaaggatggaccatctagagactgacatatctggggatccatcccataatcagcttccaaacactgacaccattgcacacactagcaagattttgctgaaaggacccagatagagctctctcttgtgagactatgccggggcctagcaaacacagaagtggatgctcacagtcagctattggatggatcacagggcccccaatggaggagctggagaaattacccaaggagctaaagggaactgcaaccctataggtggaacaacattatgaactaaccagtaccccggagctcttgtctctagctgcatatgtatgaaaagatggcctagtcggccatcactggaaagagaggcccattggacaggcaaactttatatgccccagtacaggggaatgccagggccaaaaagtgggaatgggtgggtaggggagtgggggggggtatgggggacttttggtatagcattggaaatgtaaatgaggaaaatacctaataaaaatattaaaaaaagaaagaaagaaagtagtgcttgaactggacagtagtagagcatgcttttaatcccagcactggggaagcagaggcaggtggatctgagttcaagaccagcctgatctacagtgtgagttccacaacagccaaaactccaaagaaaaaccctgcctccaaacaaacaaacaaacaaacaaacaaacaaacaaaattggctagtacaatagaaacattcactaagattctgttttgtaattcatcatggggaatattttaagcttaagatcactgccatagtcaaggacaccacaagaagacctacagtgtcaactatcctgggaccgtggagactcacaaagcctgggccaccatccagggagcgtggtggagctggatctaggtaccctacacatttgtagcaagtgtgcagcttgtcttcatgtgggttccctaacaagctgtctcagtctctgcttcctgtcactggagccccctcctcttacctagactgccaggttagtccttggtgggagaggatgtgtctagttctgatgggactagatgtcccatggtggagtggtataaaagggggatccccttctttgaggacaaggggaggggacaataggaagaaggatttgttgtgatggtgggactaggaagagaggagggagggaggctgtgattgggatataatgtgaataaaagaaataagttatggaaaaaaatcactgtcataaaaataaccatgataagggctctttctcctttatagtttgtagatgaatcttggaaatatgagaatggttatttattatcacaaattgtaataatgccgacataagcaattgctgattttagagccatacaaaaacatattcattactgggatgctcacctcctctaaaatggtccatatttctacttattaaacaacaattacaagtggagatgatatgccattgagcatcttttctacctctttaatcagaaagtaaatgaatattagccccaccctatgcttctgtattgcttgacattgcactgcagctactgtaaagtcataaagacacaactattgtgaggaccacattagtctacgtagtttggattctaagtgtgtagttgtaggtcatttggagacaaatttgcattttctgtatattcttattctttttggtctttaaaaaaaatatcaaaacatagattagagatactcaaaaggttttttttttcctttttcttttttcttttttcttttttcttttgtgctgggaatggtagttgatttcccctgagaaacaaaactcatttcaggttgttgctttatattattttcatttgatatttcttactccaggtcgagggataggcttttgtggcttttttgatcctaatttcttcattgcattatagtatttcttctgttcttctgtcataaagatgtcttgacctccaaagtatagaaaaaaaaatcaaagctggttaaaattgtatccattccctcataacttttcaatattataacaagagatttcaagagattaacatggttatccttgtgacttattttgaatttgaaaattaaaagtacactgtattgactataatacttaagttttaagataactaaaattggcattattattataattattgaaggaaaaaagcccagacatggtaaaacacaaagctccatcttccttctggcccacacttccacctacagtcagggaccagcaccctgagctctccttcacaacctgtctgcctcatgggagttcttctcccaccagaacaaccagctccatgtttcagtccacacctctacctgcaattggggatctataccctacacctcagccaacagctctgcttgcctctggggagggctttagctatctaggacaacaagtctctgagagttactactcccaaggacttacaggccagccaacaccagagaaaaaaatagatggcgaaaggcaagctcaatagaacaatagaataatcgctagaagccagtgcagtatggcaccttcagaactgagctctcttactacagcaagccctggatatcctaacacacctgaagagcaatacttgaccttaaatcccatcttatgaagacaatagaggccattaaagatgatataaataaagcatatgcagaatataggaaaatacaactaaacaggtagaaatctttaatgaggaaacaaataaatcccctaaagaaatatgaaaaatacaatcaaacgggtgaaagaaatgaataaaatggactcagatttaaaaatagaattagaagcattaaagaaaacacaaatggaagcaaccctggagatataaaactgaggaaagagagcagggactacacacataagaatcaccaacaaaatacaagagatggaagaaagaatctcagacagaggaaatgcaatagaaaaaaattaatacattgataaaggaaaatgccaaatgaaaaaagttcccaactcaaaacattcatgaagttgtgatacgatgaaaagactaaacctaagaataatagaaataaaagaaggtgaagattcccagttcaaagggctaaaaaatatcttaaacaaaactatagaagacaactttcctaacctaaagaaagggatcactatagaagcttacagaacatcattagattggaccagacaagaaaattttccttccacatattaaaacactaaatatatagaataaaagatagaatattaaaaactacaagggaaaagggccaagtaacatataaaagcatacctaatagaattatacctgacttcccaacgaacctctaaaagtcagaagatcttgcagatgctaagagactacagatagcagcccagactattatacccagtaaaactttcagtcatcatagatgaagaaaccaagatattctatgacaaacccaaatttaaagagaatctttctactaatacatcctataatggatactagaagaaaaactccaacacaagaagagtaactacacccaagaaagcacaagaaattaatcatcttacagtaaaaccaaaagaagagaatcacacacacacagaaccaccactaacatcaaaataagaggaactaacaatcattggtcattgataaatttgagtatcagtagactcaattcaccaataaaaagacaggctaacagacacgtaaacaatttccatcattttgtggcatacaagaaacacacctcagcaacaaaaaaagacactacctcagaataaaggcctcaaaaaaagttttccaagcaaatgaacccaagaaaccagctggagtagctattttaatagctaataaaatagactttcaaccaaaattggcaaaagagatggggaaggacacttcatactcatcaaagggagaatccactaagatgacatctcaattctgaacagctatgccccagaagcaaggaaactcacatttgtaaaaggaactttactaaggctcaaatcacacattgaaccctacacaataatagtaggaaatgtcaacatcccactttcaccaatggacaggtcattgaaacagaaactaaacagagaatcaatgaaactaacagaagttatgaaccaaatgaatttaacagatatctaaataaccaccccaaaaccaaagaatgtggcttctactcagcacttcatgagcattttctaaagctgaccatataattgggcacaaagcaagcctcaacagatacaagaagattcatattaccccttgcattgtatcaggtcaccagggattaaggctagacttaaaaaaaaaaaagaacaacaacaacaacaacaacaacaacaacaacaacaaaaacccagaaataacagaaagcccataaacttatggaaactgaataactctatactcaatgatcactaacttggtcaggaagaaatagagacagataccaggtgccaaagttaaatcaggataagaataaccatctacacattcctataacccctaaggaaatagaagcaggcattaaacttctcccaaccaaaaaaagtacagggtcagatggttttagtgcagaattctaccagaataccaatgctcctcaaactattccacaatatagaaacagaggaaacactacctagttcactctatgtggccacagtcactctgatacttgaattacacaaagactcaacaaagaaagaaaactacagaaccattttgtcaatgaaaattgatacaaaaataatcaataaaattctcccagacccaattcaagaacacatcaaaaacatcatcaccatgatcatataggcttcataccagtgatgcagggatggttcaatatgtaggaatccatcagtgtaatactagtactccccaaattcttccaaaaatagaaacagaagaaacactacctaattaattctatgaggccacagtaaccctgatacctaaaccacagaaagactcaacaaaggaagaaaacttcagaccaatttcacttatgaacatctacgcaaaaaacactcataaaatattcacaaaccaaattgaagaacacgtcaaacacataattcactacaaccaagtaggcctttcatcacagggatacagggatggttcaatatatgaaagaaaatctatcaatgcaatccactatacaaacaaactgaaagaaaaaaatcacatgatcatcacattagatgctgagaaaacctttgacaaatccaatactcctttatgttaatcataataaataaaaaatgaatgcaacgaacaaatagtatgaaatcatgggacataaagaaatataattggctgggatgaacttggatacatccaaaactatttgccataaaatgcacaaaaaataaagttaaattttgtttccctttaagagatgtcaaatattaacaactaaagggaatgtctggtgtctgtgagagtggtggagcaaggtcatgctcacatagcttattcagttgactagttatttaactacaaggaggcaatatacttcactctggaatttaatgtaagaaaagatttaaacactcaaatgttttgcaggaaaaaattacttaagtcactaaagattagatagattgaaattggccaagttatgataaataaacatgaacacttttaacaaactgagaaatctctgtgataaaagtatttaaaattgtacattgggaaacatttcagggctgggaccatggcttagtgcatataggcatttgcttacaatccaaatcacctggattcaatccctgggactcaaagggtggaaggagggagaccatatcctgtaagttgtctactgactaccacacacccagtgtggcatgaataaataactgtaattttaaaaagtatttcagagatggctgaagtgataaatttattacacattggcgtgaatataagctcagatcccaacccccatgttaaagtgggcatggcactatgttattaaaacaaaaaccaaatggtgatggggatgcagagataagatgaatccattaatctcactggccagccatcaatctgaattgaagaggagattcaatgagaactcctgtcttaaaaattatggtgggtagtgattgagaaaggtgactaatgtttatcactggcttttacatgcatgtgtacattcatcctcacagacacttgcacacaccaccacgaatacacatacaacacaacacaatacaacaacacacacacaacacacacacacacacacacacacacacacacacacacacacacacacacacagagccacatatgtacacagaatatttcagggtcagacaacgtgatatgtgactatagttccaatttatttgagaaggatacagggctgctacttgttttaggtcacatagggccatatagtgagatcaggtcagcctagattgaaaagtgagaccatcttaaaagaaaaaaacagatgagaagtagttcaaaaaaggagactgttcatggaaagagtttgagcagacaaagatgaaatgtggaccattgttactactgagtgataatatttgcatgcttcctttagtgcacatatataattgaaataatcaaacatgccttaagaatgataatagataaaacaaaaattcctcaaattagaactagaagtggttgctattaattaaataaccagaagaaagaagtacaggtagaaaagagtacaaaagaagtatatacactgaaccgtattttaaatgatggataattactgactatgtataatcatgggatttagtgtgatattgtagtacagacatgccagtgttctctgatcaaatctaaccccttttccctcacctttccacatgcttttccagcctctagtgatcttttagctgcgaataccttataaaggggagtgagtgaggagttattaaggataaaacatagggaaaaggtcgtgagctatttggtttctgaattcaagatctcatcttgaattccaattcaaatagaatgttaattactctgattccttgtgttaggaaaaattgtaaaaatacttatcttcttcttttgctggttgaaattgtcgataatgacaccaataaacaggttcagggtaaagaaggacccgaagatgatgaagatgacgaagtacaaatacatgtacaggctttcctcatacttaggctgtagttcaacctgccaacggagggaatttgttaactgataaagcagtttgaatactgggagcaagtcggtgcttctacacaagagtagaaggctatatatattcttagaaataatttagtgtattttattcccatatcaacagcctcaaagaaacaaaaaaccaaaaaccatccttgaaactaggaagcaaaaagtttttgtgtaaaaagtgatgcaattcgtcactctaacactaattgcataattttacatagtataactgacattctgttatttggataatagactttagatttggtaagttttaagttaattgattttcagtaatttgaaaatactagtgtggtgtcttatgtctgtgcaactccagaatttgggaagctgaggctggagacttgttgagtactattctagcctgggccacaatgcaacatcctgtctttaaaacaaccaaagaaaaagttagtgaaaaattagctcttataaatatagagaggacacttttatagtcaagattcacttgtgtatgaacttatatagcaaatgaaggaactgaagtattcatttggatgctggcatcttgccctaccagtaacaaagtcattaaaatttttggattgaatagacacgttcaatgatttattttataaaatcctccattgacgactgactctcagacttgcagttataaaaatagacacagggctgtcactcaatgcataacaatggagtcaatatttagtataaataggtaactactgcagtcttctatttttaaagacaacagctaaaattaactgaacatctaagacaaactctatgcaacaaggtgagatgatgcaattccagaggtgatcaagaagtttgtaggggaacaggacgatttcaaatttatcattgtctccatagtaagctagaggtctgggttaccgaagaaaaccaaaacaagaacaagaataaaaaaacaaaaacaaaaaacaaaaaacaaccaagtaacaggaaagaagaaaacagagattttacagttttggagatcaatcttagaggaagcctgtgatttttgagtacatctgaaagctaggaaaagtatggaatcaataaagtagaaatgataacagtgttggtacataggaaagctaggaaaagtatggaatcaataaagtagaagtgataacagtgttggtacatctgaaagctaagaaaagtatggaattaaaaagtagaagtgataacagtgttggtacacactccagtgaatgcatgggtgctgttcttataaaggatggatttagaaaagactatgacacatttctaagatgtttagcctgcatctttagcctttcaggcttcaaagcatggagcctgcctacacagttcagctactgaagacagtcatatattcttctatgtcctttatacaacaaatagaaacactttggagaatatctgttgcttattaaatgaaagagttgaattttttctttcattttttgacttccatttttttttctgaactcagtacaatatctctgatagacactgctgtgttaagtacaaactcaatatactgtcttcctattttttaattaactaaaatggagttagtttgtttggctaattcataagctaatttaagcaccaaatcaatatttccagaagacattggatataaaaaatacttacatttctggaatcaactgcagcatacatgatatccatccagcccttaaatgtggcctgttggaaaggacatgcatgccttaatttgggttaaatttcaaaactgatgcttactaatatccttactgtacatgtttaaagaaatattttaaactattttcaaaacaaactttccttggattttgaaaaaaagatagaaagccaacaaaatggcgatctgatataacttcctattttccaaccagctctaaagtaactctcaagcttaacattctattacaatttggaagaaagtcctagaaatgtaagtggacttggcagtgtctacagcaagaacaaattagatctgcgatattctgtgggaatctcgtcttctaggtgatcaagttgacagtatttaaggtttttctttatgcttacagtgtatggatcatatgggcataaagaaaaaacctgaagctattcttttaagaatttttcagaaataacactatattcattttctatggggtaacccctgaaaagattgtgtaaatataattaacaacataataaaagtgtgacaaaataggactgacacttgtcatttgcacattgatgagggattcctcctctaacctcttgcaggcatttgtcatgtgtcttagaacacaagtttgaggctacaggacctgaaatatatattccatagtcaatgaggaagcctcgcatatttttgtgatttatctttgtatttaaatcattgactcttggaaaatgtgggagtgtgaccagagactaatgtatcttagtcagaaaacggaaattcttttcacatcaaagagagagatgggtgatgtgtcagtggcttagaccaattatagaacctgtctatcacacacttcctacaggaacagaaaagtgatttgacctatttctatgaacttactcatcaacagagaggtgggcgaaatagtcaagtgtgaaatttttacttagtagcagaacatgtttgagagttctgtgcacttatctggattcacaaatttgtactaacagatgataatgctgaaaacatattataaagtttcttcctaacaaaataacagctgcaataatcactttgttattattctgagcaataaaaattttcagagaaaatagtgttcacttacaacttgaagcaaagaaagatacccaaatcctacattatcaaagtttactttcacatttttccaccgggcggtctcatttctttctattagttttaggcaatcagaatgattattgacttcgctgatctcaaatatgtcaccagttgtggtgttaacacagtggtagaatttgccagcaaacaaatttacgcccatgatgctgaaaattagccagaatataaggcaaaccagaagcacattcatgatggatggaattgctcctaacagggcattcacaaccacctaatacacaaatggagagaaagagaagtcagaatccttattgattaaaagcaaaaagacatccccctaggaatcattgatttattttctatcaagactacttatcctatctgtgtaagagcaaagcagaaataatcttaacataaaactcagtcttttttaaatattatgcttaggaaaagaaatataggcaatatgcaaagagatggagaaaagaaagaaatctaatataaaaaaggtgctaaaggaaaagcaaaatgggagaagttagctcctggatgaagacacatgtgtagtttattagaaaaaataaaaggaggagagagaagtaggaactcctaggcaagagattagctcataaaaaaaaatcccaaaacaaaacagtatctcaaagaatagaactaaaacatttgggcatgaattgattggaccaatatactttaaatataaattaaaattcagatgtataaatataaaactatttttaacatctaatatatttttggccttaattatccatgcattgctataactaatagtagtttttgcataagaagcaagacaatttagcatcatgtatttcagtagatcatcacatcgtttatttcaagctccagtcatgtcagttgtttcatttactgagtttaattcaataaacttatcttaaatgaaacactagagagatcattttctcaggaaaacaggaaaaagagggatgtcatacgtacttatcaactctgatgtgactgagtaaagtcctgtgctaaaatattttctccattttctaatgtcaaagatatttccctctctcttgtccttaattcgggactacagatttaaaatgggattttttttttttatatttgacatatggtagtcttggcttccttctctatagctcaccattgaactgcacattagtaactaagagggagataaaggctggccctaatgtgctcttaattggcaagtgtgtttcagacttgaacatggacgtcagattaattctactcatgttgggggagggggggcctgccacttttgttagtttaattatgaatatcatctctttgatttttattatagtataattttagaagtttttgcctgtctgacagaagtataagagccaattccttgtacttctgagccctggctgaactttgtaaggaacaatatccattggggaatacaaaatagtgggctatgtggccaagggaaatgaaaccagtaacaataaagatgagggatgaacatgaagaagataattcagagtgcgctatcaaggcagaagccaaagataggctgatgtgtagaaattaatgagcaactatctccctttatggcctccctaaaaaattagcacacaggctttcctgtatatattactttttaaagttattttcaatttaatttttaaattattaagaagagatttaaaaacattttaatgtaattttttaaaaaattgtacccctaaagttgtttattggatttgagatatgaacactgaaattgagtagttgtttctcatttctgaatacttcatctcccactcacagtgaggtgctctgtctgccgaggatatgaaatccatactaacatgcaagcttttcacttttaacactcatgacactgaacattttggtacaagtctgtaggtttcatgctgcttccttcaaacctttccaccttggccattggccctgttctctatcttcgctctgtcctcggttactaagaattacattcttatcagattttatttgcttgccttctttcagtatggatactaaatttatctatcccatgtcccattttgaaaaattccttaatggttctctagccattagaaaacatttctctttctttggcatttacatcactcgacagtttgtgaggttattttcctcaaaacagtttgcaactatgtttatttgtgtgtgcatgtgggcatgcatgcattttctatagcacttgggtggaggtcacaggaaaatttgcaggaattattcctctcctttccaccatgtggggtcagttctggggattgtgctcaggtgctagacttggctgctgaaggattctcacaagcctgatacatttcccctttcagcttccctaactggtgacatacacttcaccctcctctgtgacagtcactccacgctaaggtgttagtctgagaattgagagccttctttctttgaaactccctgccaagtacttgcccttgaaataatctccctcctccaggctttagctcaaatatacatgtcgtttattgagtctaactctacacatccttaacaaagatgagagtgtttgccttcgaattgaggaattataatttagtactggaaagagcaataaggacaatttggtgcttggggttcatttggaaaattagactaatgaaggtaaaacaagttaggttcagaaagtagaccagaattggcatctcatactcttttctgtttatcctgcaagttttttcaagagtttcaacctcttatggttttctctgactgctctgtgtgaaagttaaatattttcttatattccaattgttagattatgatgcttcaatgtgtcaagtgtacatatgtgtgcaagtgtgcatgcacatatgtgagcatatatgtggaagcatagagctgtatgggaaatacatgtatagatgtagaggaaagagatgtaggggtcggggggggggattctttcttatttattgcaccaactgaattcagagcttgaggacagggctagtttcatctttctagctctggaattacatgtaagctactatgcccatccgacatttctgagggttctggatatccaaattccagtcctcatacttgcctggctaaggatttaaccactgcataagaaagcagtttgcataatgtaataaatgggagagatttcctttgaagaagggactggttttgaattaaaagtaatgcccattagtgaattcaggatggcaaatactatataggaatgcagttcaggaaaacgtgcaaatttgccatagatttggcccagtgagacatttattttacaaggatgtttgtcttagagaacatttggcataggatcagaggatttgccactgaaaatccacttaaagttgcgatttcattaacatccagagcaaaagatcacaaacggattgcctctcccaagagcccaaccatcccttggttctacaatattaattctttgcagtctctagggagagtcagtaattggctcccatgtgggatgcgctgggaagtgttggtctaagtcaattggaaagaacacattgaggttataaggtacataaaaggagatgtctaagagagaagtatgcttaatgggtggattgtagaggttgtctcttctaacaatgttttaaaaggacatctcccagcagaatttctgtattgtcacacaaccagttcttcaagtctatttcttctttagggttcatactttttattaaatcagtgaaaaattaggaccaggcaaatattcttgttgatattagaaatttcagtgcatttgaaagtatcatctaagtgaagacatttagattagttttttaagtcaccggaaaccatgggttctatagcttttctaagaaatagagaaaaaccatatgtgaataagaatttaaaaaatggaaagtaaaaatcatgagttcttaatatgaaatataaaaaatttttagaaaagccaacaactaaatcagtgttgtgaaattttattaagataaatatttttgatagataaatgcctcaattatccaaacaatttttttttcttccaaacaataaaaattatctttcttatccaagactcctacattttaagaggaagcagaagtgtcagtttggctttttattttggggtgcactgtgatgccttctaagattctgggaagttaattggggtagcttacaaggagttggcttatacaccaatttcttagtgctcatgatttttttgtttttcatgcatatcctattctttatacttcaatgaagttgacttttcacatgttttggttttataacttaaagcacatctttttttttttttgtattcccttgtttcacagggatcttgccttgctactttctgcaaataacacatttttatgcaataaagatgagaatgatcataaccattggcaaccctgagatacctggcctgttgtacctttagccactgctcgcacacatcaacgatcaactgatggaatgtgactggcccattgagggaccagagcagtgtgttgaaaaaataaggactatatgctctgtcactaccatgagcttgacaaatgaaaacgttttcatcagcatcctacaccagggtcccccaccctcaccaattgagtaatttccccataaatggacaatgaagtataaatagctaaatcatattcagtgaaacgtaataaagatatgtacttctggggttataatccacagatggtaagtcagagataactttttttttcccaaaagaagtttaagctcattaaaagtagtggatttggaaataaatcctgtattgtccctactgtggtgcaattgtacccttcccactccctccctcaatcccactacacataagtcacagtgcaaggattaaaggtagcaaaaggggtaatacagtacccataataaagggctgaggggaggaaccaccgctccaccccatccaagttggagcaagattatcctatataaaatagaaatatatagtttattattagttagaaagctgatatgacagaacatttggtgttactttttgtatatgatgctcactgcctgtttccctagcaactaagacttgagttctttggaaaaggtttttacgattttcccagcttgggaaattaaaactacgaatttaaatacaagttttatttgaccctaggtattcacgacatcggttcattccgttcaatttcacaagttgaaaaaaaaatttggactggaaatttgaaatacaataaatgttcaaaagctgtcagccaaaagtgtgcataagacatgcaaaacacaaagggcaacgtgatgataactcgtttgttactttctaactccttctcaagcactatgcagcatgctgtgtttggtagtgttgcgtagaagcacatgctttgaaagagtgacaaaaaacccaaaacaaaatgactgcctggttgacactcggacacagcgattgcggttctatgctgccaaggaggataaagtgagagtttctgaagatactctagctcacttcccgcttacaatcatcatcatgcccaacctcgccgccatccacagttatatactcttacaaagtagaaaatgtctcatactagaaatacaaaaaccagaatcaacagaaggttggttttgacttcacaatgccaaactggtggtgaggaattgccgtgaccttgagatatttgtggtctcactatgtgccaagctgaccaaggagtcagcttcgtaatatctacccagaatttttgttttgatgactccagttttaaaaaagagaagcatatcaacaataattgacaaaagcattattaacaataattgataaagttatttctacacaaaaggaaaatagactcatttgttatggaaagtcaatattacatataaaaaataaacgactggatttaataatattctaaaagatcaaagttgaagtataatctaacaaccttatatacgtagcattattcattaaaggcctgacactattactgatgttatggtgtgctgcttgtaggcaggagcctagcatggctgtcctctgagcccctaacaacagctgacagagacagatgccaatatttacactcaaccattggactgaagtctggatacctgtggttgaattaggggaaggattgaagaagttgaaggggagggtaactccataggaagaccagcagtcccaactaacccagaccccagggagcttccagagactgagctaccaagcaggaacatacacaggctgggcagaagcagaggactgcctggcctggtctcagtgggagaagatgtgtataatccttgaggaacttgaagccctggggaagagggaggcctagtgagggagggagcatcctctcagaggcaagggggaggaggaatgagatgagaaactataggagggggacagggaggagaggtaatggctggattgttaaaaaatgcgaaagaaaaagaaacataaaaaaaccataaaaagttgaaaaatgtgaatttaaatttagctcatgtatttttatataaaatgtataaaaacaatgttttccttgacaactgaaattgctattctgaaacgaaagtgctcttttaattggaaaagcatttaagttttgcataattgggagaaaatttatgatacatttttaatacaaatgtgatttcttgtgtgagaatcaaagctcctttgtgcttacttggatctactgaagagaagttttcatatgtgctagagaaattaaaaattggacaggtttcttacagtatagtataataaaatttataataggtttttatggggggacacaggctgaaagccctctatgtggtgcagagaggagcctgtttgttggagccttggtttgtaagtgtcaggacaatgagcactctttgccttatacatttcatctgattggtttaaagagcgtaaattttggatcttaataaaaaaataattttcacacggcacatcttctataaatgattgtataatgctttgaaataatcatcataacaatgagccaataaatgcaaaaatctgatacgtgttgaattatggagaggggaataatgctttgctcaaaagagcaacataaaactctgtgtaactgagaaccgaggtttaagttaaggttgacgagccatgtatggcaatgaataaaaatacatgttctttttccttatcagctgtattgtcataagatgtgtatgtatttatagtaattaaattagtgtcttacttattcaatgtcattaatttagttacagttgaggcagtattattatactccagtcaatggttaatatctgcccttggatatattcaaataatgagaattttggcattgtaaagacaaaacatttaacaattcttcattttttcctttgtattcatacacatttgtgattcacattactttccataggatcccttaagtactgatgggctgtcatagaggagaacgatatgaaacaaaattatctctaggtaattattacatgactcaacttagttctttaagagagtatctgcccctccccctttgtattaggaattataaggaaactcccaagatcgattatgaactaaggtcattttaattagcaaagcagataaatgatattaaatcattttcaaagaggccgattttctcttgcatatcaccaagaagtaaatatgcaacagagaaaagggtaaagtagcaagtttgcaaagggttgccattccttttgcatgcacgtgtttttcgttagttaagttgaactcagcctagctttgacaatatacaacgctgcagagttttcctttttcttaccctcatcccttcaaatcgtgataaggctcttaggggtctcagagctcttagtgtccttagggatttgatggccccgagttcagagtaacccaaggcatttgctgttaaactgaccaatgaaacctgtacaatacaaataacaatgaatcaataacaccgctttcgtccaatttgcagttatcaactaatacaacagataaagttttattcatagctgttctgttattctactgaataaacacagcaatagtgactcctaatgatgaacggctttatccatagatcactgccccacctaaccctcgccagagaagctctctcttgcagtaggtgatggttaacagggacccacaactggacagtgctgagtgagagtccttggaaagctcagtactaaataggatatcttcatgaaacccctcctctcactccttagagagctatgtggaagaggaggctaaagagtttaagagcacttgttggcatccacaataatgtctgggtttggtagctgtatatgggatggatccccaggtggagcagtctctgggatgtcaacaagtgcttgctgacaggagcctgatatagctgtctcctgagaggctctgccagtgcctgacaaatacagaggtggatgctctcagccaaccattgggctgaacacagggtccctagtgaaggagttagagaaaggacccaagctgttgaaggggtttgcagcaccctaggaggaacaacaatatgagccaaccaggacccccagagctcccagggactaaaccactaaccaaagagaacacatggtggggactcatggctccagctgcatatgtagcagaggatggccttgtgggacgctgttcctatgaagcttctataccccagtgtaggggaatgccagggctaggaagctggagtgggtgggttggtaagcatggggagttgggaagggataaggggttttcagaggggaaacaaaaaaaaaggggataacatttgaaatgtaaataaaataactaataaaatttttttttaaaaaagtttaagagctagaggtggggagtgactccaagaaaattagtgtcttccagatacaacagggtgagggacatatgagctcacaatggtgacagacttgacggacaagacttgtggaaaatttaaactggactaaattgtagcgtgggggaggggaggtgagcaggaagtttttacccctaaccaagatgctatttgataatgctgggagagaaaaatcagttttcctcaagggagtgacactgggtatatgaaccacactcagggcagtctgcaagagcagaagtagctggtctacccaaatgttctcgaatttgatttttgtttgtgtgctcttattttgttgttattatggtttagtggttggttgttttcgttttttttttttttgttgttgtagttttttgtttgtttttgcttgtgttttattgcttatttttttattttcttttttcttccctttcctttcctttcctttcctttcctttcctttcctttcctttcctttcctttcctttcctttcctttcctttcctttcctttcctttcctttcctttccttccttcctctctctcttccttccttccttccttcgttcttcctttctgtctgtctgtctttctttttctttatttctcttttttccttccttccttccttccttccttccttctttctgtctttctgtctgtcttccttccttctttcttttctttctctctttctttctctctctctctctccctccctctctctctctctctctctctctctttctttctctttcttccttttctttttataaagagaatggagttgtcaggatatcaagacaggaggatctgggaggacttgggggaaggtaagcaatataatgcaaaatacaccgtagaaaaatttacactgtatgaaaagtttaaaagtaataaaatattaaaaggacataaatgaatatcaagagtaaagaatttgcaaaataccaagtcctaaccccacttggagttatgaaagcataagctaatgcctattgattaatttcctctctcttttctgtaaaactgatgactcctttgagatttccatcaatttgctcactccattttggcctcactgagtggccctgttacttgtttttaagtattcataactaaaattctccataactcactattctcaaattctcactattcataactaaaattctccataactcactattctcaaattctcactattcataactaaaattctccataaggatatttggtacatcaaggactctgtaaatctcatttacataaaagaaaatttcttcctcatcattaagtaggtttgttttcccctaccctctgtaaccttacttgtaatagacttaaaaatctctccgtaaaatcttccagtagataagaaagatttataagattacaatagtgctcaccatcccttctgtatcttgctattatttaccactggggaagaacatcaatgaataagtgcatgaagacccaatctggagtcggtcaagtttataacatggcagaatagacaccataccttttaaatgtctttttctatcatttgcattatatattaccaatatcattgtttaaatttggttttcctactagatcttatctcctctttttaaattagttagtaaattagtccagaacttgtaagttctatgctattattaggtgagagagtttagggctggggagcctatcttgtcatcacaacacagtggcccgagactcattcattggtttagaattgggatacaaacaagacaaactccctcaaacaaaaggcacgacatggaaaatacctacatcaacaattaagaagtctagccaacaccaggcattggtgaagtatgtttgatagccataggccacccatttgaggagcatctccaggatgaaaatgtaagtgaagactttgtcagcatactccagcatggttttgatcgtctttcgctgatcaatatatatatcctcaaaggcctagaaagaaaaggttacacattttagctttcaaacactactagaatcttacagctagctttttctgattatatatgcacatggtatttccttgggatggaagaacggggatacagtattgctattgctttgttactctctgagttttatccttataaaccagagagaaagatatactttagatagctactaaaaccagagaggggggaggtgtcttcatgacttcactcttcctgaagtgaaatggtaatttcctgagtcaattggctaagccaggatgtatttcttaatgtcacattccatgcagccatggcgtgtctctctctctctctctctctctctctctctctctctctctctctctctctctttgttattggatattttctttatttacatctcaaatgttatcccctttcccagttccccactcttggaaagcccctatcccatcccccatccccctgcatttgtaaggctttgacaggcctcataggagagagctatatcaggcttctttcagcaagcatttcttggcattcacaatagtgtctgggtttggtgactgtatatgggatgaattcccaggtaggacagactctggatggcctttccttcagtctctgctctatactttgtctccatatttgttcctatgagtattttgttcccctttctaagaaggaccaaagcacccacactttggtcttccttctttagtttcatgtggtctgtgaattgtatcttgggtatttggagcttttgggctaatatccacttctcagtgagtgcataccatgtgtgttcttttgtgattgggttaactcactcaggatgatattttctagtttcatccatttgcctaagaatttcataatttcattgtcttaatagctgactccattgtgtaaatgtaccacgttttctgtatccattccactttttgaccttagccattctgactggtatgaggtagaatctcagggctgttttgatttgcatttctcttatgattaaggatgttgaacacttttataggtgcttctcagccattctatattcctcagttgacaattctttctttagctctgtaccctgtttctttgtttctatgctgtgggtgtgactcagtggctagaacagttgtctacgtgagaccagtagcttgacttccagcaaaaaccaaatttctctcattattatgttttttttataggagagagattaaatcaataagtgatttatcaatatactgtccaattttattttactaagcagttaactgcttttttggggttttgttgataattctacttctttactttttctttcttttcttttgtttgtttgttttgtttgtttgtttgtttgttgtttgttttacaagacagggttactctgtataatagccctggctatcctcactttgtagagtaggctggggctctaactcacaaacatctgtctacctcttcctgatggaattaagggtgtgcaccaccacatctagctgataattttactttttggtacgtatagtatgacattacttaataggaatgtcatattacttttcaattagatccacctatgccttttcctaacataaacctcagctggtaatttacttctaatatatatttctttcaatgatgaaaagtcatttttgtctatgatatgcagatatgtagataatgatatgtagaagacagttattccatcaacaattttatagaaaaatatatacttgattttaaaacttgtaagtcattgtgttttaatcaggcaaacacttgtgcttatttatttatgtatatattctatcatttatctaaatctatatatcatctatctatctatctatctatctatctatctatctatctatctatctatctatagtttctctattatcaatctctccaaacattttattttatgacttcaatatatttttatatctaaaattctgtcaatatagttgtatatatgtaaacaattttcatctaaatttaaatagattctgatgaaattaacatgtttctataaacataatccagtctttaagtaatcacttaggtatggtgcccactacttagcattaccaatatcatttgtttcctgagtagcccaagaatagtgaacacacatgaaaagggacagagaagaggtccccaacgacctaccaagcttccacaaagagttcatcagaactcagaggatatataaccactataatagcactaacatgaactctgatgtgctcctcatagtcatgtttagttaagcaaagaggaatattcactttgtttataatgactaagcaaaagggacccgttttttttgatctgtttcatgataagcaaacatcgatgaatgattagaaatgtgtgtgcacacatagatgcaaacccagaaatgcagctagtcattaactatctggcaggaagataaaagggtgttgttattgaagactcattgataactaaggcaatgggaaacaaaggcttaaagagtgtgagattttcccagttgctactgaagcactttgggttaaggttcactcaccagggcaccactactcaggagaatcatgaacacaatgaaggtctcaaaccagttgtgttcaactattcggaagcacgtcctccgtaggttccaccactgtttccctcttccttcttccacgctgatttgacagcacttgaatctctggacacagcctgcaagcatacggttccaataggagtatgaaagatagctctaccacctccattatacattgcatcagcccagcttcatccctccaccaccagcgctattcctaatttgctttaacttttaaaaagtgtgtaatttataagcaatggcaaatcaatgaaaacatacagcatcttcatattttgccttttctctgacacaatgttgccttcaaagaaaactcattgtaaattacaaataacgacatgtagtttgccttttgtggttgttcttttctcatctctctctttttttttattttaattttaaaaatttctttaatccttttttatagtccagtatttatcccactcctggtctggccccttactgctcctcatcccatatttccctaccctagtatgtaagaggatgtgcccacccacaccccaccagacctccccactccctgggacctcaaatctctcaagggttaggtgcattttctctcactgaagctagaccaggaagtcctctgctgtatatgtgttgggggtctcatcagctggtgtatactgcctgttggtggctcagtgtctgaggcatcttgggagtccaggtcagttgagagtgctggtcttccatggggccaacctcctcctcagcttcttcctgcttttctctaattcaaccacgggagtccctggcttctgtgcactggttgggtgctagtatctgcatctgactttttatggtctgaaattaatgcatttggttggagctactctagaaaagggtttcaaaatgaaattaatacctggacagaaacctcctctcctaagtgtgtattcttgtggtgctcctgaaagggtgttcctggtttcctaagttgtctgagtttgctaacaggtgactttcctggacttgctttgatgtgtcttttacgtcctcacattgcttttatatactgaatctagcctgtgggcctcactctctacaaggtctattacatttaagccacccactttgggtgatcgacagttgaaaaggccgtactccgtatgaactgcaagcgatgtcacccgcatctttaccttcagtgaagcaagcttcgggctcaagggtttcttctggttcaatgacaggctgttcctctgcaggcgccccaatgtctactgtgcttccctctgaggagctactgctttcgttgagtttctgggcataaaatgatcataaaaagcaaattcttttaatttaattccccaatgaatgacataccaagaagggattatttttctcaaggtaaggtgctaatgtaaattgagagtaaaacgaagactcagaagaagagggaatgggaaaacctaactgttgattcctaccccaggaatttctgtgtgcagattgctgcgctgtgctgggatgtcacaaattgaccatcagcaacatgtagtgagggaactcctatcccatggattggggaaggagagagtgtcgtgacttgtaggaatggggagagagataagggaaatgaagctcggagaatctctacctgagaagaaaataaaaccattaagctagtctgtgtttaaacatttacatatgtttctctaatagtgtctcaattctgagaaattataacataatgctttaacttacacttcctgttagaacagaggatcagaattatttattataaatgtattcatatttttatatttcatatgccttttggagaaaaggtgttttacaataagttaaaaatacatcaataaacaaatagccttagactcttaattaaaggggttcattattggaaaatattttcgaacctaaagtgttgcagaaacagaccaataaatgcatggaaaagtcagtttccgctcaacaagtaacacactaatatcccacgtaaagctaattcaacagaaacagcgtttctcagactttggcagtagtcaccagacacatggtgctctttggatccttaggagtcaaagatggcaaaaacagcagaaaatatcaacttatcctgctgaccttcaaattgttgtaagagtaaatagtacacttggcaatttagtcaagttaagatacactgagcgccaacaatgtgctagaaacttggtgttcattggcaactataaaatccgtagccctattagatacttgaaataaaatacgatgtttttcaaacgatggatttatgtttaatctaaaagagatctcaccaactacccagtcaacacatatttttaaataataaactttaagcatcatgctaaaactactactactaattcgtatacatgaaacagttttctttgttccatcaaaggaagatggcttctacacctgggcctctatccagctgactgtctctcttccttttaaatttcttgttaaatagaaaattaaaggtcacaaggatctgcattgacatgaaagaccagtcatggttctgagtgtctgttttaaagattacctctgttattatacatagattcttcactggaagctagttttaagtttttaaataattatgactatagcacgtttacatattcatcatctggagaatttgctcctctgcacaggatacagcaacaggtagactttaaatctacactgcatttgctttgaatgattcaaccatttcttctgacttaaaaacatatccaaggataagtcatgcatttggccatataataagtgaagagactataataaatggctagtctgtgtgcttgagttacagtgcccattctgaggattcctgtgtctttcctcaacataactggaatctataattggctgtaatgtgctacaagaattatttcttatttcctaaaaaaaaccctgtgagtagaattttatcattatccagcattcttcttcttctcctcctcctcctcctcctcctcctcctcctccttcttcttcttcttcttcttcttcttctccttctcctcctcctcctcctcctcctccttctctctctctatatatatgtctgtctgtgtgtattctctttgtataataagtaaattgatttgagaagttaagagtccttaccaaaattcattaattactagaaatcccatcttcctccctctgaataaacttatgtgtgggcagggattcagataaactttattgtaaatagaaattttaacttgctgagcatgtaacagtgatctgttagatctctacagatattttgctctctgtcaagaatcacaatatcaggtaccattcagataaaacctaatcttcagtgatatcatttttcagtgtcaagtagaacaaaacgctctcaagcagcctttctacaacaatggcatttgctagtaagatactgcatatagctggttctacgtcttgccagccatatcatgtttttcacaatgaccactgttttcattgacgtgtgaagtactgacttcttattctacgtttaaaagattacttagttgatggaactaaatactatttttcttgttctaagaaaaaggagtctgaacaggtgagagggtgcgccacagaaccggatagcttctgggacaggcggaggcacagagccactgaggcagcatcctttgcgggcagcagacagccggccaccgtctggacaagaggacaggtgtccgcctggctcagaaggcagcctcagcctaaggagcagctgtcgccatcttggttccgggactccgcagaacctaggaaattagtctgaacaggtgagagggtgcgccacaaaaccggacagcttctgggacaggtggaggcacagagccactgaggcagcaccctttgcaggccgcagacagccggccaccgtccggaccagaggacaggtgtccgcctggctcggaaggcggcctcagcctcaggagcagtggtcgccatcttggttccaggactctgcagaacttaggaaattagtctgcacaggtgagagtctgcaccacagaagctgacagcttctgggacctgccaaagcaacacagcttctgagaaaggtcctgttttgggccttcttcttcggccaggaggaggtccaaacacaagatatctgcgcaccttccctgtaagagagcttgccagcagagagtgctctgagcactaaaactcagaggagagaatctgtctcccaggtctgctcatagacagtaacagaatcaccagaagaacaatctctaaacagagtcaactataactactaactccagagattaccagatggcgaaaggtaaacgtaggaatcttactaacaggacccaagaccactcaccatcatcagaacccagcactcccacttcgcccagtccagggcaccccaacacacccgaaaacctagacccagatttaaaagcatatctcatgatgatggtagaggacatcaagaaggactttaataactcacttaaagaaatacaggagaacactgctaaagagttacaagtccttaaagaaaaacaggaaaacacaatcaaacaggtagaagtctttacagaaaaagaggaaaaaacatacaaacaggtgatggaaatgaacaaaaccatactagacctaaaaagggaagtagacacaataaagaaactcaaagtgaggcaacactggagatagaaaccctaggaaagaaatctggaaccatagatttgagcatcagcaacagaatacaagagatggaagagagaatctcaggtgcagaagattccatagagaacatcggcacaacaatcaaagaaaatggtaaatgcaaaaagatcctaactcaaaatacccaggaaatccaggacacaatgagaagaccaaacctacggataataggagtggatgagaatgaagattttcaactcaaaggaccagcaaacatcttcaacaaaattattgaagaaaacttcccaaacctaaagaaagagatgcccatgaacatacaagaagcctacagaactccaaacagactggaccagagaagaaattcctcctgacacataataatcagaacatcaaattcactaaataaagatagaatactaaaagcagtaagggaaaaaagtcaagtaacatatataaaggcaagcctatcagaattacaccagatttttcaccagagactatgaaagccagaagagcctggacagatgttatacagacactaagaaaacacaaattccagcccaggctactatacccagccaaactctcaattaccatagatggagaaaccaaagtattccacgacaaaaccaaattcacacattatctctccacgaatccagcccttcaaaggataataacaggaaaaaaaaaaaaaaccaatacaagaacgggaacaatgccctagaaaaaacaagacgataatccctcaacaaacctaaaagaagacagccacaagaacagaatgccaactttaacaacaaaaataacaggaagcaacaattacttttccttaatatctcttaatatcaatggtctcaactctccaataaaaagacacagactaaaaaactggctacacaaacaagacccaacattttgctgcttacaggaaactcatctcagagaaaaagatagacactacctcagaatgaaaggctggaaaacaattttccaagcaaatggtatgaagaaacaagctggagtagccatcctaatatctgataagattgacttctaacccaaagtcaacaaaaaagacaaggaggggcacttcattctcatcaaaggtaaaatcctccaagaggaaatctcaattctgaatatctatgctccaaatacaagggcagccacattcattaaagaaactttagtaaagctcaaagcacacattgcacctcacacaataatagtgggagacttcaacacaccactttcaccaatggacagatcatggaaacagaaactaaacagggacacaagtgaaactaacagaagtgatgaaacaaatggatctgacagatatctacagaacattttatcctaaaacaaaaggatataccttcttctcagtacctcatggtaccttctccaaaattgaccacataataggtcacaaaacaggcctcaacagatgcaaacatattgaaattgtcccatgtatcctatcagatcaccatgcactaaggctgatcttcaataacaaaataaataatagaaagccaacattcacgtggaaactgaacaacacacttctcaatgataccttggtcaaggaaggaataaagaaagaaattagggacttcttagagttcaatgaaaatgaagccacttcatacccaaacttatgggacacaatgaaagcattcctaagaggaaaactcatagctctgagtgcctccaaaaagaaactagagagagcatacattagcagcttgacaacacacctaaaagctctagaacaaaaggaagcacattcacccaagaggagtagaaggcaggaaataatcaaactcaggggcgaaatcaaccaagtggaaacaagaagaactattcagagaatcaaccaatcgaggagctggttctttgagaaactcaacaagatagacaaacccttagccagactcactagagggtacagggaaagcattctaattaacaaaatcagaaatgaaaagggagacataacaacagatcctgaagaaatccaaaacaccatcagatccttctacaaaaggctatactcaacaaaactggagaacctggatgaaatggagaagtttctagacagataccaggtaccaaagttgaatcaagatcaggttaatgatctaaacagcccgatatcccccaaagaaatagaagcagtcattaatagtctcccaaccaaaaaaagcccaggaccagatgggtttagtgcagagttctatcagaccttcaaagaagatctaatcccagttcttcacaaactattccacaaaatagaaacagaaggtactctacccaactcattctatgaagccgcaattactctgatacctaaaccacaaaaagatcccacaaagatagagaacttcagaccaatatcccttatgaatattgatgcaaaaatcctcaataaagttcttgctaatcgaatccaagaacacatcaaaacaatcatccatcctgaccaagtaggtttcatcccagggatggagggatggttcaatatacagaaatccatcaacgtaatccagtatataaacaaactcaaagacaaaaaccacatgatcatctcgttagatgccgagaaagcatttgacaaaatccaacacccattcatgataaaagtcttggaaagatcaggaattcaaggcccatacctaaacatgataaaagcaatctacagcaatcccactaaaatcagggactagacaaggctgtctactctctccctacctattcaacattgtacttgaagtcctagccagagcaattagacaacaaaaggagatcaaggggatacaaattggaaaggaagaagtcaaaatatcactttttgcagatgatatgatagtatttataagtgaccctaaaaattccaccagagaactcctaagcctgataaacagcttcagtgaagtagctggatataaaattaactcaaacaagtcaatggcctttctctacacaaaggacaaactggctgagaaagaaattagggaaacaacacccttctcaatagccacaaataatataaaatacctaggcgtgactctaactaaggaagtgaaagatctctatgacaagaacttcaagtctctgaagaaagaaattaaagaagatctcagaagatggaaagatctcccatgctcatgcatcggcaggatcaatatagtaaaaatggctatcttgccaaaagcaatctacagattcaatgcaatccccatcaaaattccaactcaattcttcaacgaattaaaaagggcaatcggcagatccatctggaataacaaaaaacctaggatagcaaaaactcttctcaaggataaaagaacctctggtggaatcaccatgcctgacctaaagctttattacagcgcaattgtgatcaaaactgcatggtactggtatagagacagacaagtagaccaatggaacagaattgaagacccagagatgaacccacacacctatggtcacttgatctttgacaagggagctaaaaccatccagtggaaaaaagacagtattttcaacaaatggtgctggcacaactggctgttatcatgtagaagatttcgaattgatccagtactatctccttgtactaaggtcaaatctaagtggattaaggatctccacataaaaccagagacactgaaacttatagaggagaaagtagggaaaagcctcgaagatatgggtacaggggaaaaaatcctgaatagaacagcaatggcttgtgctgtaagatcgagaatcgataaatgggacctcataaaattgcaaagcttctgcaaggcaaaagacaccgtcaataagacaaaaagaccaccaacagattgggaaaggatctttacctatcccaaatcggacaggggttctaatatccaatatatataaagaactcaagaaggtagactccataaaatcaaataaccccattaaaaaatggggctcagaactgaacaaagatttctcacccgaggaataccgaatggcagagaagcacctgaaaaaatgttcaacatctttaatcatcagggaaatacaaatcaaaacaaccctgagattccacctcacaccagtcagaatggctaagatgaaaaattcaggtgacagcagatgctggcaaggatgtggagaaagaggaacactcctccattgttggtgggattgcaggcttgtacaaccactctggaaatcagtctggcggttcctcagaaaattggacatagtaataccggaagatccagcaatacctcttctgggcatatatccagaagatgccccaaccgataagaaggacacatgctccactatgttcatagcagccttatttataatagccagaagctggaaagaacccagatgcccctcaacagaggaatggatacaaaaaatgtggtacatttacacaatggagtactactcagctattaaaaagaatgaatttatgaaattcctagccaaatagatggacctggagggaatcatcttgagtgaggtaacccaatcacaaaggaactctcacaatatgtactcactgataagtggatattagcccagaaacttaggatacccaagatataagatataatttgctaaaaacattaaactcaagagaatgaagaccaaagtgtggacactttgccttcttagaataggaaacaaaacacccatggaaggagttacagagacaaagtttggaagtgtgatgaaaggatggaccatctagtgattgccatatccagagatccatcccatgatcagcttccaaatgctgacaccattgcatacactagcaagattttgctgaaaggacccagatatagctgtctcttgtgagactatgccatggcctagcaaacacagaagtggatgctcacagtcagctattgaatggaccacagggcccccaatggaggaactagagaaagcacccaaggaactaaagggaattgcaaccctataggtggaacaacaatatgaactaagcagtaccccggagctcttgtctctagctgcatatgtatcaaaagatggcctagtcggccatcactgcaaagagaggcccattggacttgcaaactttatatgccccagtacaggggaatgccagggccaaaaagggggagtgggtgggtaggggagtgggggggtatggggacttttggtatagcattggaaatgtaaatgagctaaatacctaataaaaaatggaaaaaaagaaaaaggcttatctgagaaatgcctggaatgaaaattgcaagaacccaaaaggcactatgttatcttttgacacattttcaaaatatcattttatgtagaaggcaaatagatatgcacttcaaaaaattcatttagactgtatttacattcatatttcacatgttgacttttttaggctacctacataaaattttcactcttccaaagtctttgtaaagaatatatgcagactgacagtttttccttgttatttttatattggcatcttaattcataaagatagtctgaggcttacattatttctattcaaactttattcttttgagttgtcgaaatatttctttctagtgaggatataatgggacagtaagacaaaaaaataaaaagacaacaaacactggtgtgtacaaactcaaccacctttactggaattttggttacataaaggcctaatctccttatttttaaatgcaattctgtcttctgacttatattttaccttcagtttaactgacctgaggtcagatagccatatacaatatctgctatcttgattttctaagctttactttgagttccgatatactgttcctttttgtaaacatctatggatacttgtggataatactaacattaaaaatactagtaatgggctacagatggttcagcggttaagagctctgacttctcttccagatgtcctgagttcaattccccgcatccacatggcagctctcaaccatctaaaactccagttccagaggttctgacgccctcatctgatcttgtgggaagaagatatgtaagtagtacacagatagacataaaagcaaatactcatgtgtgtgcatgtgtgtttgtgtgtgtttgcaagtcttattatatgaaataaaataaaggagtctcaatgtcgtcatttaatttgttacattttaatcatgagataaaacattgcttcagaactctaaaagcaaaggtatgcttattattatttatctcattgttaaaacaaaaagtaagtgcagttctttggttaagttatcactgctactcaaatagggaggaagctcaatagctctgagggaggggctcacctcaactttgcacacagacatgtttcatacaatattctaaagatcctaggtaacaatgcaacccagtgttgtcaaacaagtattttattattttaaaacttaatgaagtagactagttcctttttattcttaagttggtattaatttttgctttttaaagtatgtttcttagtgttttgaaattaataaaatatgttaaatccattttagcatttaatatgctattaatcaatcttcaatttattaattccctaatggactagttaattagaggctgggtatatttttccatataaaccgtctgatctgtgcaatccatatgtacttggcaggttatttatgaggtgagatgatcagttactaactgcgaccctgatggtaagagcattttcccttcaccgtggattcatgctcccttttttttccttttttttttttttttgcttttaaagatgttctctggtagagaaaatgaccttgaaaatgaaacaaaacaaaacagcaacagaacaagccacagcttggggtttctttggaaggaaccagtcaggtgtctctttcttctcagctttaactttaaacgtgagatgtctttattttgtgacctagtttattacagggatattattaatgtatattaatgaaagtttactttttatttttaagatttattattatatctaagtacactgtagctgtcttcagacacaccagaagagggcgtcagatctcattacggatggctgtgagccaccatgtggttgctggggtttgaactcaggacctttggaagagcagtcagtgctcttaccccctgagcccgaaagtttactttttaataagtgataaaaataattgggattttgtaactgatgggtcatatagtgcactgtcatatgtacagagagagagatgcaacaaagactagcacggaaggaacttatctataaatgaagcccatactcatctatgaacaaagcatgacgtgtttttaaccttagcctttcgctgacttgatacttttatacaaaaatatataaatgagattcctgatgctctgtttatcagttattattgtctcaaagggttaaaatacttggcaaagcagtttaaatggaagaacgttttcttttggctcatagtttctgagcaggcagtgcatgatggtggggagagagcatgttggtttagagcagtgcatgtcatggtgagcaagaaaaccaagaaagggaaagcagcctctgctggtagtcatcattgtcgtcatcttcgtcttcttcctcctcttcctcttctttctccccctcttcctcctccccctcctcctcttcctcctcttcctcctcttccttttcctcctcctcctccacctccttctcctcctcctactcctgctcctcctcctcctcttccttcttcttcttcttcttcttcttcttcttcttcttcttcttcttcttcttcttcttcttcttcttcttcttcttcttcttcttcttctccttcttcatttcttcttccccctctccttttattattcagtctgtgctcccagtccctgggtgggtgtcatttccatttaaacatagttttcttcttagttaaccctttatataaactccctaatagatgtactttggggtgcaccttacagttttctaggtggttctacatttagccaagtagacaatgcagattagccatcatactccatagcattaaatatatgaatgttaatatgttgttgtgtatattctgccttaggagatatttctaatgtatgcattaaaatcaaaatgatcactattaatgactctcaacaaagcaacactgtcatatcaaagaaaaagacactattgagacagtagttcttataaagcagcagggaagctcaaacaccagcccttagtgccccatatcatcagtttccctaatgtcggtctctactaccctaacttctcaatataaagacaggtggtattctccatacaccctgtttgggtactagcacaataggcaaattgcattgacacaatctattctaatatactaaaatttaaaaaaaatggggtaacatattggcttttaaactctaactgggcgatggcttgtaatttagaaacattacatctctaatgtttatactattgtaatatccatgatttttaaatcagcagatttctgagctacaagagcatgggaaaagaatggctatgggctctaggggttctgtggacaatcagtgatgaagatgtcagtgctctttctattcctgattaatgcaaacagaagctgtacaaatgcgaatcatgttaattttcagtggaaagataattttatggatactttttacaatacaattgcttatcagtaatattcagtacataataagtagctgctactattattcagccaatattaaatgtacgcctatagattcaaggacttaagatgaggagattcaaactagaacgaattttggaaatttatcttgtcagaaatttagaatgatgtgtttaaataagatgttttgttgatatttttacttttagatgtgatcttatatgtttcaggcttccctgaagctcactatctagctgagacgttgagttcctgatctttctgactttacctgcccaatgatgggcttttagtcattaggtaccatgctcaacaaacatttatttcacagttgacatctaccatttatttcctagaaaacaccaggtactaagtaaacattttaaataagacaatgttcacatagtagtccttaagacattcagtaagttaaaaaaaaaagtccatcttcctcccacactaaatccatctcattggagttagtagtttccccactgtctcacttctgtgttattttgctttctcttctttcacgagaagaccccaaaatatctcaatgcagccactgctagttttaatatcagttcctacttctaaaagtgggaattccaatatgacaccaaagtttttataaaagcttgaatcatcattaaatagacatattcaacaacctaatatcatgtcatgtgtctatgctttctgctctaggaactaccaaccaaaacacaccattgtttcccttgcttatggttgatataccagtcgatttttaataggaatagagtatctttgaatagagtgtctttaaagtatttagattactcaagctctaaatatgctttgttatctttgagacttccatgcaatagcattatatcacagaaatcccactgtaagatgaaaatgtagttagagaaaaaaaaaccattcaggacacacaaaccactgaacaccatagctagcaatatacacaggaatgtgttggttgttcagaaatagtaacggtaagttagcccaagttagagacagtcctaatatccacaaatgttttagctttaatattttcaagtaggacctcatggactgaattacattcccctacccattcttctatcctaaattcaattgctgaaactgagagtctctaaatatctgaaggtctggcttgataatgagctctacttatctaatgactccaagattctcatccaatagagtaattcccttacaagttgaggaagagacaagagatccatttctgttcagtgcacctatcagtcaggccttgtaaagacatagtgagaaggtggacatctacaaccttagcaaatagtcctccccagacactgaccctgcagtaccatggtcttgaaatgtctgctttccagattgtgaataaatttttttttttgtgtgtgtgtaagccatctatttcttagcaccatgctattttatgacattatgtaattttaatgtgacaattggtagggagcactttttttctgaagttcactcagttatttaaactgagatgacacacacaaaaatattaaaacttaaagacaaaggcttcaggttcaaagtggggttccacccctcacaggttacatgctcttagccagccaaagctggttgtttttttcttttgttttgttttgttttgttttttcacttgaaactttacagtaatatgttcctttctgttcattacaaggattaagtaactaatgatgctagtttttaattcattatttgtacccatttaacaaacagattttaagaatgagaaaactcatacaacagtatattacattttgctttggcattcatctccctgagaaaagatttttggaatctcaataaaataatatttgatattatatcaaaaaggttctatagaatcattaatacagaaagtataatccatacatatatttatacatatacatctccccaatttacagcatcttacctctttgctttcttctagatctgattcactgctaaagtcttctgtgtttaagttctcaaagtcagactctcccacagcaatgggcacagtcacagtgaggctggggttgtttatgaatgacatataatcactctcatcaatgatgtacttctccacactgctgcccgtccctatgccacttgtggttccattcacatctttcagacagtccagatctttcccaatttctgttgtgtggttagagatacaattgtcttttctgttgtttagatcatcaagtggcttaatttcatctagaatcttctgtttcttaacaaaggattgttgaatgaattcatatatttttctttttacataagctattcctttgtgcatcctgtccacagcaatctgcaggttgttcatctcattgtcatcatcagtggctgcaaggttgtctgcactaaatgagctcagaagcaaggccagaaagaggttcaagaccttgaaaacagacataagtatgtgttcaccacaacacagaggacataggatggcttattcctttagctatagaatgaataaccgaatgctatatgagcaagatacagcacaggcattgctagaagttaagtgggccaagaccagaaaacatgaggccctgggttcaacactccgccctagaaaagttttgagcactctgaatttgtgatattgctccatctctatgtacatgaggcattctttctactgctctcaagatctcccatacatgaaatgaagaacttgaatgaattagtttatcattatatttaatattatatgagtaaaagaagatatatttactgagatactttaacaattccaaatttaaaaatgattaatatttgcaattatttatttaaatgtattttgggttttctctcttcatgattttgtgttgttggatgataactgaaaaaaatcatagtcatgaccaaatttagaatgaaagtcttcaacatatgcatggaccattcttgttagcactattctatagcaaaaattgccccctttctccctcacatgcacacgcacacatagacatcacacacaaacacacgcacataacatatttgtgtaaatttttaacagtcctatgcaatttaataactaaatgcaatgaagtgactgaataaaatagagttgagaagccaggtggcacaatcactttaatccaagtacttgggatggagaggcaggtggatctctgagttcaagcccagctagatctacagagcaagttccaggacagccagggatacagaaagaaaccttgtcttaaaaaaatagagctgtaaaatatggatttgagagtaaaatatcataggtaatattaatgtgcatacatttgttttaagatgtatttctatattaccatagtagattgtgatactatactttgccatgttgcggtatatttttagaataagaagataaacatatcttaagatcagaggcatttaaaattatttatcatgaaagtcattttttaataaattgggcacaaatttgttatgttattgatgtatttctgaaatgcatatctaacttgggtacataccacaaggttcccaatcaccatgaccatcatgaagacagtaaggcacatagcttgtcctgccacctccatgcagtcccacatggtctctatccactccccacacagcacgcggaacacgatcaggaacgagtggaagaagtcgttcatgtgccaacgtgggagtttgcagtcagtggcaattttgcagacacaatctttgtaactttttccaaacagctgcatgccaaccacggcaaaaataaagacaatgatggccaacaccagagtcaggttgcccagtgctcccaccgagttaccaatgatcttaatgagcatattcagtgtgggccaagactttgccaacttgaacactcggagctagaaaatgagaacaaattaatatacattattatgatcttcacaagcattaattatcttgagacttactaaagaataaggggctgcagctcagagacagaacacctccttagtgggcatgcagccatgagatccgttgctagcactacacacccctaaaaaattctgcttacattatcttgctctaactttctcaggttcatagttaatatttagaccctcataggaagaatctagcttttccagattttaataatgtggctcatcttctctgaaagtgatttcctagttgcatattagaaactatattctttaatttgtttctctgagaccatcttccaagttttatagtgtcatattgatatctgaatgtgaataatttctgccaaaggattcatttgtcaaaaaggttctaagtaacattgcattgagagcattgatgaaaataaaatgaaaaatatttattatctattaatattataacagaggaaaaatataaataaatgcaatgtattgttaaacctggattatttgctatgactcttcctcaatcttcagggaatttgtatgaatctatctatctatctatctatctatctatctatctatctatctatccttaatagacctgcaaacttttgtttttatggaacatattttttagaagtagaattacatgcatacattttatgtgaatatcgaagagttatttacattttcaacatttattaagttattaaccatttctattaaacacacttcttcaggttgaaagtattaattgtccaagtcattagaaagaacacattatcaacacagcaatagaaaaagatatcagtgttcacgtgacggggctagtgacagctcaaggctctgggttatgtaacccagcactgcaaacttataaatgataatattagaaagtttacataaataggcttttcagaagaaagttgcctttgtaaaaaaatatacaaatattacctgagagatattattccccatttagaggtatcagcctacacaaaaacttaaaatgataatagttttgtggaaaagtatagggaagcactatgagagaacaccactggggaaaacagttattattgcagttgtcttgtttaccagtcgaaatgaacggagaactgacaatccttccacattggcaaggccaagttctaccaggctgagtgtcacaatgaaaccatcaaagatattccagccttcttggaagtaatagtaaggatccattgcgatgattttcaggaacatttctgctgtgaaaatcccagtgaagacctaaaagcaaaaccatattatttaaattatcttagatagtgataacatcaaagataatattatatatatatatgtatatacatatatatatatatatatatatatatatatatatatatatatatatatatataaaagactaatgctacttctacttttccattattgatcctaagattatcctacaagtttatttgacaatgctggtttatattagtttactgttttatgctcatagaagctccaataaccagatagtgtaaatgctgtaactattttattacagatgaagagaacaatatttcaaggtatataaaatgcccatctattattaaccaacttccagacctcatgtcacctagacaagattttgccccaaaacattttatttgtaagtttatctttattcccttcaaatcatgtgtatcttatattattctcatcactatcattaatattagtcacatgcactaaaagtgcgtttccagaatctaaatagtagagatttaaaaatataaatccactatagcatatgcatatttacattgtctttatcagcaagatactaaacattctcctagatattatatagaatgcatgttatactttagatagttctttcttcaaataaaaacctgagacttttaagttgagtctgctggaaaatattttaacaatttatgcttcaaagtaaaaaatggagaatattgtcgaaactttcactaaaaatgggcttactaatcatatgatgtacaaaatgcactaggtactgtcaatatttcatgatatgaatctagaacagaacttagactcccttgaccctggaaggaaaaaagatggagacacttttgtgttatcattctttgaaagagcatataaggaagagaactcatgaccttatttgaaccatctggagctaggacagagtgatcttatcatttaaagaagaacatggccttagattctgaaagaacaccattactgactttttaaattattattacaggtctatgttctatttctcagtttttgcacagacattaaaggccattatttggcaaaaggtagtgtgtacccgtctggatattattgccttagggatgcaggaattgtggttgaaagaggtctaataaactattgaagataataaacagtttcttaagcagaaaatttgaagaccaagctcatttatttaccttcttgcacacttaccaagtttcccactgtaagaacatggttgaaatgttcagtcatggggtagtgctccatagccatgaagagcgtatttaacacaatgcagatggtaatggccagatcaacaaatgggtccatcaccaccaggttgacaatatgtttaactttcagccaatatggagaacagtcccaaattaagaatatgttggaaaatttataccaacagggtggacatttctgcctggattcttctagttctagatttaaaaaaaaaatagaagaaacaataaccaattatttgaaccatctagagctaggacacagtgattctatcatttaaagaagatcatggccttagattctgaaagaacaccattactgacttacaaatttacaaatttattttagatccactaaacatgctctcagtagcaaacatatttctctttgctgcaaagataattacttgataaaatggtacagtatcattagtcatgtacatagagataggaaagaaaactttttgttttgtttttgcatagacagtgttgcttaacacttggcctctattacagtggttgggcatatagacaaaggttccatggaaacatagcctggaactattcactctgtgtaaaatttcttgttactgataggctacacaattttaagatttaggacaaggattaatgtaatatataaagaaatcattctttatgctttgattttgtgaaagtgacttattcttttctccagtcttaaaattatttcagatcataatgtaaggggccatgctgctgaagtttgaagcacattacaacaaaggatttgtgactaatggattagaaacctctagctgttcccacatacttattaagacattaaaagttcagaagtttagaacattgaatttagtatgtaatactttcagaatacatcaccagccatttgctagtaggactgttccttttacttttgttcatagagtgtacttgccaacacataagtagagagagttgactccaacaagatattgcaagatggctgaactgagggaggtagggtttgttaccaaccttctactgtatttgttaagatgctggctatgctcattgccctttgcctctgggaaggatcttctagaaagtccatggaaacatggaaagagctcgacctcctctttctcatctcagtttcagtggttgttccctgcaaagcaaatgctaaggcattacatgactagcttgagcaatacagcacagaaataaatggagacagtgattttcatgaaagacatgcgtcatgcgtcttcatctttgatggccaatggcagatactggtgacttattggatcattaacctggaatattcaaacagttaaccatgtagtcataaaggaaaatataaaattttgacccctccttgattttatactcttatgaaataggatgcgatcaaaatatagttagtaaagctttgcataggcatttatagcttgttttcaattaatgaacatactgtcaaatcttaatgccttaaaatcttatatatggtcaggccatttttcactttcgagaaagtagctgtttaattttaagaaaataccgaagaccataacacacttagctgtcatctcaatttctaagcataagacatatactcatttattataaagtatatgctgatccatgcatgtgatgcaggggcaacagtttcatccaggataccaaagcaataagtcatctgatttacaccgagtcatgcctcgtcatgctgatatatttccaattattttatctggattaataatttattggtgtctctgtgtagattgttttgtgaatacctatatcagcatttctttcttagtgagataaatatgatccttagaaaatgtaggtaatgatgaagctatctaagcacagtgtttttgaaaatctgaactaaagcccagataaactgtaagagtttagtgggaagatttactatacaccctttacactaaaaagtcattcatttaatcttacaataatagggcactaggggtgatgtcttcatatgtaaattcggtatgggtacatagcaaatcatccaaggaagtaattattgttcaattaatccttagcatatacagtaggtaatgcattcaggtttgtgcaaggagtgccgaggcgctaacatttagctggttagtctattaaaggtgctacaagatgcaggtgcattctcagctcgaccaaccaggaatcattctcaagagttccattctgtagaaacactggctggtgcagcaatcataggccagccatgcctgaactatgtaaaactttcttacattgtcatcagtagctggcttatctattatcacctctggcagaagctgtccaactggcgatgtgggaactgagggtccaccaaccaaggaaaccacaccattgcaatccaccgtgctgtgcatcttcccattggctggaaacaccgccagcattcgggaggacctgctggtctggctcaggttactgttgcgtcgctctccgtgtcttcggggaacgaacagtgagtctctacggctctcattatcctcaaaggtgctgtgttcatcatcagcaaagtcattctcagaccccacatccttggctcgccctctaaagctgaaaagacttgttctgctattgcgtcttggggagaacagggaaccacgaatgcttaacagagactgaaagtttgaaacacatgacaaaaagtaaaattacattagaactgcctgttgaaatagttttgcaagtttaagttgaagaatattgcattgttattttagagagggtagcacattccttctgattaatataatttattggcattcagatgagattaaattagttctatacagtatggcttccagccattgatattaaataacagatagctggagtgcagcctaaaagtaatgggagaaaaaaaaatacccagccaccacgtctcaaatttaaacagagacatccttaaaaatctctctatgtatgtatccacctacaatgaacatgggcagcaagacagcaacggtttttaatttctctctccttttggataattccaacaatagttttcacagactattttagttcagtttcctaaaaccatgttatttatttttttgacacagctgtaaaacagattacttgtagaaccagaaagtaaaaatttcgaaattctgaatgatgcacttttctataaagtttatcatggctaatatttttaaagttcatgggataattgataaagaagttatgggatgacaaccaacatggtgccttaaattaaccaaaggtacatttctgagtagctaacccctagtctacattttgttgatgtggttagaatagctgcaagattaaatgtcattacaattaccagaaggcacatttaacatgaaaagccagttctcctgtcttccaatcctgtgttatttcaaaagcacctaagagtggatttgcatatatgtggatgggaagtaaaactttcacataactacatagaggggaaaaaacagttttaagtgtaatgcaacagtagtcaattcggttgatgaaaacccatccatctatttaaattctctctcagatggctcactctcatcggtgtatccaagaactctgcagtgcgtacctgatgcggggaagagtacctcttttcatatgtcagtctattcccttctatggagaagcgaaaccccttcctcctgatgctgtcttcagactcagacttgtggaattcatcatcatctttctcttctcctccagactgctctttctgtttcctttttttcctccgatttcgtctttctttagcactcttcgaactcaacttagaggcttctgaagagctatctgagagcctgcctgctgcactgggctccctggaatgttctgaggctgttgtagccgctgcctgctatatagaggagaaaccaattcagtgtgttgcaagaaacgactgcattaaatctttaagatgctcaagtttggtgtgtcatgtccaaaatgcaagctaactgaaaccaacatctagatgatgttttccaggtatgaagggaagtttttttttctttttaactaataatgaattttaaaaataatctacttttctccatggtaacatttattaactttgtctgatgccgcagagattcgtaagattcattggcagtcaagaataactcaagattctattcaaagctggtaatgaggtagtgagcaggggtcctctcaggtttccatgcttatcaaagtgttcaatatcttccacatagtatcaacatatgtggagatgttccacataatcagcgttatgaaacatatcacagtttcttcctcactctcccctgatacagttatctatagaaaggagagagttgagagctttctgctaagcaagttaaaagatgttcagttctctaaaagccatcccaactatcttcatatcaatgttggctcttactagttatggggtaagatgctgtgtggtcacagcttgttctgttatgaagaagttagaacttcttagtcaacattcttcccacaattcccttaatctagaactgtagcagataaattagcatgcttgaagtaactcttttttttttttatggtcaagatggttacaaataaatttgatttaaatagtttaattagtctttttgaaaatacacataatgaattcgtatgtcccatttagaaaccacaaggaaacgtgggcaattggattcatttttttttttttcattcagtgagtcaggtacactgacaagccatggaaaggtcaagtaaacctcttgtagtactccatattgctaatgatgcttctttgcctagtggatggttttgaccaagagaacattttattaaaaggaaattgaacaaccccacctaaagacattgtatttctgaataaagaaaataataaattactttaatgaaatggccaaatgggttttatatgtcaactaatgaatttgcttgtcagaaaagattgttgtcttatgatactttttctaatgctagtatatttgagtaaaagattttaaacttgggggggggcaaaaaagcccaaagttactatttctcttttcttcttgattctatttaaagtgataaaaataacataagaagcatcttctgtagctagtgtaaaacagctctgtacaacttagtgatgtgactaggccaattcaaactaaaaagatgacccatacatagaagtccttggagtttgatgtgctcagctttctcacatcctgtcagatgactctgccttttgtttcattacagctctttgtaacatggcagtgaaagaggtgacaccagaagactagagaaatgaaggtcggagataagacctacttgaactgctgagtacctgtgcagcctcttgctgcttcttaagttgctccaacatctgctgaaattctgcctctttctgttcagcctcctccagtgtggcctgattctgctcctcataggccatggccaccacagccaggatcaagtttatcaggtagaatgagcccaagaaaatgaccagcacaaaaaatatcatgtaggttttgccagcagcacgcaatgtctagaaacaagaatatgagaattatttttacaattatgtcggtattgggtgacttcacattttaacttacttgtgtatgtggcagaactctgacaaaattaacattgtgtcccatcagtatttctttaacctctatctcttctttcttctttaagataagcattcatagtcataataagggattcttggattcaccaggaataacagttgatagaaagcaatggggaccaccatgaaaaagctgagcctttcatggaaattaaagagaccaatggaaaaggtaatacttgagcagaggacagggcagagggaagacttggcttttgcttaggagaaattgtatctaagaggaatgagaaatagaattcaaggcatggagaaacagaacagaattactctccttggcgttactccatttaatgcgtattgtaatcaatgggttagaggagtccgagtcattctttctctactgtatcatgctgcgggttgtgtttcatgactcagtttgtgttcttacacgcttttacttaaattttcagattctcaccagttggtatagattttcccagaagtcctgagtcatcagtcgaaacagggacaaaaatgcccaactgaaggtatcaaagcttgtgtaaccataattagggtttctaccagcttttacacacatatatccttctggacattggctgcaaatggggaaaaagaaagtatgacaagacattctgctgtcttcttactctggtagaagcctacacttacaaaataatctagtcactacttaaaggacacaggcgtgtggaatccgaattgctgatacatttcccacctttgactccatagtatctatcttattagctgcaaggtattgatattgcttagtaaccttttcccctcactgtgaagtctccaaaggtgattcatagctttatacgtacaccaagaaaatagcattacagatcaaagtgttgcttcttgctttacagatgaaactttaatatttagataatttcttgttttatttatatcatagttactgacaattagtatgcataaagttagttgctgttatcagtcaatttctagagccaaagatacacacagacacatccatatacaaacatatgtatggggacatactacacatacatctcacacgcgtgatcagcttaccctgcatcagagctatttccacacagcagtgcatctaaaacaccctccaggaaataatgatatcctgtttgaaaaaaagagaaagccacatgatacacacttgcattgtgaaacacattaaaagaagagtaggaaagtcaggtcttactttttggttcactaagtgagtttacaagtatcttatcatccacttaaacacatgagttttttccttttcttccttcaaattctgttattaaattaaaggtatcgataatcaactgtacgaggtttttttcttttcattattagtggaatgttagtgacaaccatgggtacttagggaacatttatgaaaaggtatcagtattttctactacttttgtaaaataaagaaaaagttcatcatccaaagaagatgacaatgatgggtatctcaaaaataactacatatttcaaaagaaaaaaatgatatattttcttgttctattttcatattttcaatccctgttaaaactttcaaattaattataacttacatttttcagttcgtagtatatatgtcaattgacacaaattgtatcaactatctgaatattttaatgaaatgaaatattttagaattgaatataaaacaaataatatttcttacaaattaatgaaaaatgtagaacatcttaaatattaaagttaaaacaattagagtaggcgaacatcaaatcttatcagttctccctagttctcaagagttcacatctttcattactagaggagccatgtctgcaagactttccttggccatccatttcctttccatcaaagattgacaaggaagaaacaacctcaggttgtgtccagtaggttgtatgctcacacagtatcctcagaaaaaccattatcccattgcaactactcattcaaaaagtattagcgccgggcgtggtggcgcacacctttaatcccagcactcgggaggcagaggcaggcggatttctgagttcgaggccagcctggtctacaaagtgagttccaggacagccagggctatacagagaaaccctgtctcgaaaaaccaaaaaaaaaaaaaaaaaaaaaaaaaaaaaaaaaaagaaaaaaaagtattagcagtattagaaataaagcgacgttcattatccccctataacttagttgggattttgtatcctttcaagaagtgaaatgagtagataggaacaacagaaaaaagagaatggaaacaggccacctcaggaggtaggaggtggggtgaccctctagaatgtaccagagaccaggaaggtgagagacgctcagggggagggaccttaggtgaaatgcccaaccgtgggtagaaggaacttgtagagcccacctccagtagaaagacaggacatcaagtggagggatggggttgccatcccaaagtcaaaaactctgacccagaattgttcctgtctaaaagaactgcaggaactaaaatggagaagagactgagggaaaggacgtccagtgccagcctaattagggatccagcccaaggggagactccaaggcctgatactattactgatgatatggtgtgcttatggacaggagcctagcatggctgcaatctgagagccccaacaagcagctgaaagagtcagatgcagatacacccaaccaatggacagaagccaggaactcctgcagttgaattagggaaaggctggaagaagctgaggaggatgaccaccccataggaagaccagcagtctcaactaacctggatccccgagacctctcagacactgagccaccaaccaggcagcatgtaccagctgatatgaggcccctgacacatatacagcagaagactgccaggtctgggttcagtcagagaagataaacttaacccttgagagacttgagatcccagggagtggggaggtttggtggggtggggtgtgggcggggtgtagggacatcctcttggaaatggggtaggagggaggaggtatgggatgaggactagtcagagggcagactggaagtgggataatgactgaaagattaaagtaaagaaagattaaagaataataaaagaaataaggtgtgtaaatattttcaaaatttacatcagataattttctaagtgactacaacatccttgtgatcatgtttagtctgtgactagacaggaagcaggcagactatgaaaggataagtacacatattgatggttcttacttgagtcttgaatgtatgatttccagtcaaactcgaacacggtttcatttacaagtgtgccattgtaatccatagttatattcttctctatgctatgttcctcaagggaagcgttggtgggaggccactgtacacatttattcctcaggttgcccatgaagagctgcaacccgatgagtgcgaacacactgagacagaacacagtgagtatcatgacgtcagacagcttcttcaccgactggatcagggcccccacgatggtcttcaggcctgagagaaagaagtgtatcaagcatctgaaatattaaataagtccttcacacaagtctctcggagacactaaataaacgtgtaagtcccaaaatgtggcccatggcagggacattgtcctataaaaagttcgagagtgtagcttcatttaagaacatagcattcatgctgttgtaggttattctttaagtcttataattggtcttttgttagcaaagaatgggattgtttttgcataggcatcaatgggtataatgaataaaaatgaaaaatttatacatataatagggaacaaattctttataacattgacattacaaaaatactttttttttctcgagacagggtttctctgtgtagccctggctgtcttgaaactcactctgtagaccaggctggcctcgaactcagaaatccgcctgcctctgcctcccaagtgctggaattaaaggtgtataccaccactgtccggcacaaaaatacattatatagtaaaagttggttgggttgaatatcagagtgtccacaaattaaacacaaaggttgataaaacctccagagagagtaatcttataggaagtactcagtcttatgattctcagctttctgtaatgatgaatggcaagcaaggaggctcagttgaaaaagtctcagagttaactcactgattaacctacatgctttcatatagctctcacctggaatgactgaaatagttttcaatgctcgaagaactctgaatgttctcaatgctgagacattgcccaggtccacaaactccgtcacatatctgtaatgaggagttcacacacagacacaataacaggaagcaaagaaagttttgtaggtacaattaccttatgctttatagtaattgcttctaattagaaatgtgggaatggtctttagactcaatcctctaaatgtgtgaatagctaaaaattacctaggtatacaaactttgttacttacctgtaaatgatttaagattgaaaagacactagcatttatctgatattttatgaagatctttgctgcttttaaatagtgtaagttgcaaattaaaatttagacttcatcaatgtagtcttatttttcatgataaataccacaactaaatgtaaatttcataaaatatacaatcttgatgccatttggtaggcaaggtagaaacactatatgtgaattgggaaaattaactaaattaattagttaactggaaccaaatccacaggctagggtttcagctagaaaagaaatgatataggaaatcatccaacagaactatcgattataaaagattgcctcttgccccactattcaagactcgcatttcctaaaataacgtttgaatagaagttgaacaaataaattaacaatagcatcttacatggcccaaggccactctgtcatcacttctattttagtctcaagagtgagaagtctcaaatactgtcctgaaagttgtggctgaaacgcatgggaacctttcatattccaatcagacataaagttatacagttaaggtcagacatccaggatttgcactttggagccgatcagtaccatctcctgtcctgtgtatcccttcactcctgctgatgcccagaaagtcagctacccagatgggataagtggtattaatccactgtcctccatacctacttttgactattcttgaatagctacctattattctcatctcttcctggtgtggaggggcgtgatttatcactagcaaaagggagaagacaggaaagtagggactgaatatacaactcagtgtatattgaaaagctttgtgttgagtaaaataaagaagagcctaaaaacaagagagggagggagggagggagggagagggagggagggagggagggagggagggagggagggagggagagagagagagagagagagcgagagagagagagagagagagagagagagagagagagagagagagagagagagagagagagaggaatacaaattgaatcagaagggaaatagaggcaaggtatgtctgctcaagaaataaccatttatttgatttatgatgtatcaaatgtctttttcaccttaggatcttatttccagcatggctacaatctttctactattctataaaggtaacaaaagaagccacggggtgaggcacaacaggactatcagtgaaaagttcagtgcaagtttgtgggaccagtgcaaattttgctgtgtgaactttcaaaaccatcctccagctcaggagataaataagttatgcttcagtattacaagtatttgtgtgaggagaccagaatatacaatattttctttctttttggggggtagggggtgagacaggatttctctctatagccctggctgtcctggaactcactctgtaaagcaggctgaccttgaacttagaaattcacctgcctctgtctcctgagtgctgggattaaaggtgttcgccacacctgcctggctacaaaattttctgatgttttaagtgttattaaaattgctattactattctcatggagcagtggaatgggtttacccttttgaggtaaatgttaagacacggagttcaggtgcccaaatcatgccaggatgttttaccactcgagcatgttgtttaaaaacctgagcatagacagcaaaccaaactgtattctctcaggtttccaaaagagaaggcacttacgcgaatgtaatgacagtgaagtccagccagttccatgggtcgcgaaggaaagtaaaatcttctaaacagaagccccttgcaataatttttattagtgattcaaaagtatatattcctgtgaaggtgtacctagaaacaagtagccaaatcaattaaggactttgtaatttcattcagagtacatcagcttcttagcatgttgtcctcggaaaacatggataccaacaaaggaaacatgtgagtttgaatagtttcagaatccatcacatacatagtttcttatggttttttttttgtttgtttgttttgttttgtttttttcccagaatctgaccttccatttagaagcactagaagaagaggctttgggaaacactgtggggggtgaaaggtcagaaaccagagagttctaggtgtcagaacatgggcaggcacgaaagctgcgattgaaacatccagagctccagttacataactgcctctccttctactggggcatcaagagctggccagtgtcattagtaatgcttccagcccttgagaatgcttcctgaatttccactgtagacattttagccttccataaactgaatttccaagttttataatcctgaaactttagttaagttcttgatgatcatacttaaaatagatataaacctggataaatcccagtgatcaagagactcaatatggttctttattattattagatatttactttatttacatttcaaatgttgtccactttcctgctttcccctctgaaaatcccctatcccctcccctctccccctgctcaccaacccagccacaccctctttcttgccctggcattcccctacactgtggttcttaatgtagcatttacagcttaatcattttgattcttaattagcccaattaatgtggaggttatctggaataaaaagtccagcatatattgtctatatttctgtagttacttccatcaattttcttttcaaatactggatcctgaaagaaaacccttgagttttctagtagactttgtatcaattatatgagtaaagagaaatcctagatctgacaccagcaagcctgggacccaatgactgctgtcttattttaaagctgcatctataaatggctttatcacacatgttctccagtttaatttaaaggctacattgagaaatagtttcaaaaatctcaaatatatgtacaggaacaaacatttaaaataaacttactccacattctttgtccagtcgggagggttactcattgtcataaatacacagtttgtcaaaatagtgcacatgattaacatgctgaataatgtaggttagtgttaaggaacatacaaaagaaagttcatgcattgtattaaaaaaaaccaaagtaacactgaaaaacccagacctcagttcaacaggactcatgggtaaacatgtgcacaaatactacctaatctccttacatttcactcaaatttcatatgatgctaaatatgcatcatagtgtgacctccacaatttcagagtaaatgagagtatggaaggacataagaatacaagttgctattgcggttgtttttataccagcatgattaccttccaaggtgctttttctaagcgggaagtggaggtggttgggggggtggtggatgcatttctctcttttaaaatgtatttaaattttatttgcaacattgttgagcagaaagcatggatgtgaattaattgcacaattagaatagtaaattttcgaggaaggtgcatttctgcaataccgagatctcgtcgttaatggatagaattttgacgtcacggtcaaagcagagcgtggtgcagagtgctaagtagccgtgttttgagtgagtttatgtaagcacaacagcatgagaagatggaaggggagatgtgtgaaggtcagggctcatcgccactgggatgtaattgaaattccacagtgacacctgttcttgggccaatcggtcacttatcctttctgtgccttcaaccaccctctggctccacctacattcaacacccggatgttaagctggacagactttgttattggtcgcgtagattaaagtaatcagtgagtatgaaatgctcggaagcaatgccgctggagaaatgtgtacgcactgagtggtaggtcagagaagaacaggtaatagggccattgaaagtggctgtaaaaagtgttttagaaatgccagaaataaccgctacgtcctggagaaaacagatgatccgcaggatcttaaaatatgtgttttctgtcttagtagcaggtattctttctactacactcgactaaccacacaaaacatttccattaggtgtagggaaagatttcatcaaatgaccacatgatggcactagaaatgcaaactaagatggaaaagcttttgagtgagcataggcactttttataaggtacatctttagtgttcgatgatagactattaataggactaacgatttacttgtgatcaactggactcaaaaagaagggcctttattttttgttgttgcttttattgtttttgttagttattattttactttcttgttttgttttgtatctccttttgttggtgtagtgctgtttttttgtttgtttgttttattttttttaaatgaacgtttcttctttagtcattgttttttgtagtgccagggaacaaatcaaacccagagccttgtgtttggacaactctttagattttagaatttgtgattttaaaaaaaatcttgctagtatgaccttatgatacttacaatagtatttttatactaattgtgaccaaggccaccaaaagagactcagtcataaatgaaggtttttcactgatcaatatccacgccggaactgagttgcagaaacctttaaacccaaaggcgaccacagaggcaaactcccttcaaccttttagaacagttttagcttctttcctgaatctgcactaaagagacaatgctatacaacagacccatatattctgtggcttaaatctgatattcagccaacttcataaaactgatcagaaaagttgactaactagctaagcctgaagtgtcttgagattcttataagcttacatgatccccccaaaggtctttaaaatggcatacatcatatctgtgtctaatctgtattttactttgaaaatagtttttttgtgtgtgattaattttactgaaaattttatgcaactctgtacaaagatgttgacaagaaacatggcgatcttgcacaaaacttaggggattcaatacatatatgaaagctagtgttagttgtcaatctgacagaatctagaatactctaacagacgggcctcattgcatgtctctggggaattattgtgactgctttgttaattcagacggaaagacccatctactgtggctggcaccgttccctggctgggatcctggaatgtagactagggttcagggctgaaggggtgccttaatggtagggtgtttccctgacatttctgaggccccgggttcaattctcagcactacaaaaacaaaaagagatttccttgaccaacaaaagatattagatgaaagctatagagtatatgcacatttttttaacttaataatacatagaagacacaatgaatacaaacagttaacaccaaccacttgcaaaaggatatgagtgtaccaaaatcttaatagctattttcctaagaggattgaagggtgttaaaatgtacagggcggaggtggcactgaaccggaagatggccttccctttattcaatactataaaagtctgtaaaataggaataaacacataagtataaaacagacttcctattttccaatagggttgcagtgaataattccaattcagatgcccaggacaatcacttttgatatgtaccatgagtacagctctctctggtcacttatgtcccagagatgaacttacagtggctcttaccttccaccaaccacttacctgagtttgtgcatcagccacgagaatgtcctcatttccttaatattttaagtgtcttacttaagccaaagtttgaaatggggacacatttcattttcatcctaacattcacaagaattccttctcataatgatttgtttgcctagatgaagtatcaggaaaatgaatcctgcaggatgcaaaatcattcaacagaaccgaatgttttaaaaataaatattccttcactacccgtgcttataaaataaacatcatcgctccgctggtaatagagaacaaaagcagcttccatctagcccgcacctattggatggatactatccagtcattgatttctgcaggacaggctccctggagagtatcttgttgaccaggagtgctaaattctgtattgggattcctgaggtagctgacacttggtttctaatcccaattgactctcccctgtgtggaggaaaagctcaaggtccctggagaactcaggacccataaatatgaagagcatctacgacaagagtcagacttactacacagcaaagatcagtgtgcagagggaaaagactcaccatgcaatggagcaacacggcttagtctgacacagtcttctaagtcatttactgatactcagcctaggccgagatggatgaagctgacatctctgtgaataacacactaaatagagagaatgctaaggtttgagtttattttttttttagtgactctattctaattcctaagtatggggaatgcaattaaggcctcctgcatgctaagcaagtgttttaccatagggtcatgttcccagctcagggtgtgtgtgcacatgcgtgtataatctataaccaacccagagtgttatacaagggatccaccaccgaatgctgtccccagcacagcttttaatatgtttatgcatctattccttaaaactcccatgttttagccttttgatgcatagctctatggaccctgctatgattagcacactctataacgtgccgtttgttttctcctgagcattttttgatagcatttcttcttcacatttaaactttaggtcactaacatgttttcattttatttttcactttgaccttgagattttcaaatggagcaatccttgaacacagagtttctgtttgaaaatagccctttctctctgggattcaaacagaaaagctctaaatgtactatgaaaatatcccctaagtagtggggatctgttagttttctcagctgtgacacacacacacacacacacacacacacagacaaaatccaactactgagagtaaaacctgtgtttagaaagttgtaatgcaattttgagtctgttgaaaatgatgataaaataaaacaagagactgtaggctgggctatcccatttcatttcagttacttagcaattaatgtcactgtgtcatagataaacagagaccacatcacctgggtgggaaaagtgctgcttctctaagcctgacctttgaccacatgtcatctaatcatcactgaatgggtgcatccagcacaagggagacgaccttaagatgtctgtgagggaggaacgcactccagtggcaatcgcttgtggttggtacatagttcccgttattctctctgattcattcaatatttttgtccctaaacgaccttgtgaaagcatcataaaacatgaatggacttgggtaagggaaatatccttgccttaaggaatgtgagcatccaaggacacagaacgagcaaagcttaggaccaatgatttttttcaaagttcttgcctgtacctccttatccagaaacacagccagtcaaatgtgatagaaatattgggggctagagtaggaactgtagttaaaaaaattgtaactagaaagaatatatactcttcacctaagaatctaatttcatatattactatagaccgattttgaaatgactatggtgatagagatgacaaacgagtttcagggttactgtagcatcttttacaggctggaggatgagtcttgggagggtcagtagtagttcagtgggcagggaaattcccaggctcatcccattgaaactggctatactcagaatcgcaatgacacaggttccttggcaaccttctgtttacatgatgagtaaaggaagctgtagtggtttgaatgagaatagccccagtaggcatgtgtatttcaatatgtgggcctcggatgtcaaaactgtttgggaaggactttgttggaggtcatgtgttaacagatgtaggttttgaggttccaaaagtccaaaccaacctcagtttgtgttctctctgtctgtctctgtctctgtctgactctgtctctgtctctgtctctgtctctgtctctctctctctctgtctctctctgtctctctctctctctctctgtgtgtgtgtgtgtgtgtgtgtgtgtgtgtgtgtgtgtgtgtgtcttattcatggatacagtacaagctctcagccactgttccagcaccatgctggcctgcctgcctgactgctgtcatactttcccccatgatggtcatggactcatgcgaacccctacaataaatgctttccttttcaggtttccttagtcatggagttttgttatggcagtagcaaagtcaccactacaggaacacttgacagaaaatagaaaagagaaaagaggaagcagggacaaaacaggaattattagtgaggccaaagctgagactctgaaacttagcaagagagaaccaggagggaactttaggcactggaactcagcaaagcagtgttggtaatagctcggcaaccccagtcctgattaataattgaaaatttggacgaccagtggttgaacaccttgacataattcttaaattttcaaaggtttctgtcctttatgatatatttgatacatctatttattaaatgcaaataatttgtaaaaacatgttgcataaagaacttcatgtgcaatgtaggtgggttgaaacaggagactgatgagctttgactgcacagcatgctttctgtactttaatttttcataagatttcttcccacccctgccaaggactgtaacaatagtgccagccttgcagaaccactttcattgtttcttacccaatgatagatatattccttttggattgaaacatacatgcaaatgcgagcttcctacacatcactctgaagtgtttatgggtttagcttcaatagctttgcaatagagacagtattcagacttagatagcacctcattatatgtaggattgtagtcgttatgaagtcattaaatttgatttagaacttaagtttactttttccaactggtctgctatttatttttttacccgatagtatctactatgttcctcacaactttactatagttgagaagtcaggttacaactgcagtgccactcagaaataccgcactgaaggcactgcatggaggaaagagaaaaggatccaaggggatcaatgttcacttaaaacaaaggattaactccaaagctaccaaccacccagacatcccccttctctatttacatgtgcaaattgcccagtggcaagcaccaagagtgtaccttttagtagaaggtactaaaccttctactaaacctatcccttgattcatttattataggggggggggggataaatgctttaatctcattactgcaatggagtagaaatataagcacttgatgagaacattttaataccagaataattttcttccttggaacaagtttttaaacaaggcacaatgggtaaattcagatataacctttatgtataaaaactggtttatagatgtatttatgggaactaagtattcctacttaggccttaggacttttccggcgtgtgtgtgtgtgtgtgtgtgtgtgtgtgtgtgtgtgtgtgtgtgtgtgtgtgtgtgttaaaaaatgtctttgtaatatttatatgacaaaaatgaagtcatatgctctaatttaggtgtaaaaggtgactgattagcactatatttgcaaagctttgtgctgcattctgaaaagaaaacacacatatctaaatccgggcacttgcaaaggaatgctcagctacagatagtagcacagatgaatctagaagacgaacatatggaggtgtagatagcttagaactaaccaataggaacataatgtaaagacaaacctgtactttaaccaaggatttctgattgtctaagtactacatgaaaagccaaggaagaggtgaagtgcgtcttactggtgttttctgtaactcgacaacatttgaggataacatcatattaaaaaaatcactgaggtattttatgtgatttttttcacaatgtctccagtcttctcaatctggtcttattctattttaggtacccgtagccatactagctgatgtctatctactgtgctgaacagatttgacctgactttcaaccactcattgacagaccaagtcacactcttcagcaacccttgatggaaaaatattatttcaggtgttaaagaaaagcataaggtggtttgattgaaaaccgataagcatccctggtaatcaacagttttaatgacccctcccctcctgccaaaacaaagaaacaaagaaacaaagaaacaaacaaacaactcaaacctcagggaaaaataacagcagatttgtctcaagttaagagcaagagttttgtgaagcaacagttttgctggttagcgattaatcagtagtgattcgccagttctcaatggttatacaggatatgtggactgggcccttctgcttgctgtgacctagtaacttcatagaacatgactggctgctgcgattactgtcagggatgaaacttggatttgacaagtggtgtatttgcacttttgttttctgaatatacagccattggtggaaactttatttcaatcaagagcccatttaaaaaaaaaaaaagtatacagttataacttaagttctaattttgcatttcatctagacattgccagaaagctgtgacataacagagattacattgaaatgtactccattccctctctaaaagttagctacaggcaaaagtcagagataacatgtgaaagtgagctggatgccaggcatggtggcgcacgcctttaatcccagtacttgggtggcagaggcaggtggatttctgagtttgaggccagcctggtctacagagtgagttccaggacacccaggcacccagggctacacagagaaaccctgtctcaaaaaaaaaaccaaaaaacaaaaaaacaaaaacaaaaacaaaaagtgagctggataactagaaatattttaaaagctgtacatccagatgtggagcctcactcccgtaaagctagcagcccaaagctaaggcaggagtgttgtgagtttgaggcaagattgagtgctggaataaaaccttttctcaaaagaaaaaccaaataaatagtaggtgttataagcagactaaatatattctttgcctggaactttaaatcacaggggatttttaattcacacatcatctgccttctaaaaatgtatctggcagtcaattcctttggaattttaatgcagtttcacagaagagagtaaataaatatgttcttttttattgtttttttttttgtttgtttggttggttggttttatttgttttgtttttgttttttgtctcaaactcaatgtaactttcttccccaggtgctgggatccaagccaggcccaacaagtgctaagtaagcactcctccagtgaactattcccaggccttatgtaattcctaaagaaatataattatgaattaatggtggttggaactgtatcactatgtagaaggaagtgccagtctggaaatagtaacatggctctaagttgggctcaggtgcgcatctctactctgtaagactctggtggtcagactgagaaactgccctaaccctatcagggagtggggcacatttccagaggttccgcagtaaggggcgggggtgggagggcagaatgagagtcatgtaccaacatagcgatgcttcaaagtctgatgcttcaggtagtcagagattcctgtcagtctccatctccgtgaacatttttcattcttgtccaatccatgcgtctaagtctttttccctctctgagaatctttaaatggtctcctttcctcctcccctcctcttttatattcatggcttcaaacaaagattttcctctttggctcacgagggatgacaagtctcctcacagcttacctcacagcatttgcttctcggcagcaggctaacctcaattaatctaacacagcctccaccaagttaatgggtaaggtctttaagccactgattacaagctgaaatgaccagagagtggaaagagggaatgggtatctgagagtcattattgtcacatttataaactttgggagataatttaaaagttaaacagtattgtgcaaaaatagcaaaaattatagatatcagtacttcacaattaacttaagttttaactttggatctactctcatacaaaagagcgcactgtatacagagggaagattctgtcacatctatgttttctcaggttggaagagaaagcagggcagatggagggaatgctatggcattatttgaattgacatttttttgggatctcctaaatgatgcccttcactaacttaaggccatcatatgatagaagatctattgtataccctgcaactagagaatctaacctcctcctcatatgacaggccagatgctctgttagcatcttctatgttttcctttttacagaagcttgtcttcgcatctaaattcagatgtcatttcctttcagaagcccaccatttaagttttaagtgtagttgaattgtattagacgctgatactgagcatggaagatttgtttttacaaagcaggggtttggcaacatgccagtagcttacttattagtttttgcaatcttagacaaactatttaacctcagttttattattctgaagttgagaccaaaactgtcttgaaagaacctgtaaggtaccaacatgaatttaaaatgcaagtgcataatatatagggaggtagcagttgttcatttttacttatctggaataacttctctagaagtttctatcttctaattgtggagaacatctctgctccactgtctgtccttgtggcctaaatacatttgcctcattctttaggacgtgattcagcatgtgacccttacctggtccagaattcttgctcagagtttggaaaacgcatgcacctatcctcaaggttactctgctgtagatgttaacttactgtaactggggactatttttgccatgtgtgggtgagcccacctatgcaggaagccatcacagagcaaagcagagcctacactgtccatgggctgtcctgatggtgtcagtttagattccacgtcttttgttattcaaactagacttggcccataagtttgcttttcttcttcttcttctccttcttctccttcttctcctcctcttcctcctcctcctcctcctccctcttcttcttcttcttcttcttcttcttcttcttcttcttcttcttcttcttcttcttcttcttcttcttcttcttcttcttcttcttcttcttcttcttcctcttcttcttctgtctctccttcaaagtagtttttgctgagttttggttacttttatccaaagggtctcttaactagtatgactagaataaactaaatgtcaaaggtaatttatttgtcctgggacattttctgaggcagaggctaagggctgattttcctagaagaataaaaccttcctcaccctaactgaaaacaaaataagaacttggtacctcaatcatagacactcttgtgatgacagatgagatataaattggaagcctcttatgtgaaccccagtagagagatagtatccatcattttaggtctgttggtggagacaataggttgtttttaatgttaggaaacattcaaggacacagtacagtttttaaatgaatacatttctatattccaaaatataacaagcttctattttcactgcagatctagaatatctttctatttctagtcaaatgccacattgtcaaaaggatatttcttcccatggcactaatgagtcatctgtaattttaagaacataagaggggagacgttttctgaacaaagagtgggtgaagctgaatgtataggcaaatggtacagtagtagctcaagttatgaaaccgacaaaaaaaaagtcccataagaaaaaattgtactcacaaactgaaatgtccttgttacacaaagtgaaggaacaaatagaaagtattcagcttcgactcataccttaaaggtcccctgaggacagcaaccatgagatggaaactcagtgcattgcaactttgctatctcctttccacttcacggttgttactgtttctttcattgctaataaaggatctctgatcacagcttaaatcactttaataattttagtagaacatttgattattacataatttgcagatcagaaactgggtcaaagaggataaaaatatgtgggcatatgtcacgataacatataccactgtcagtgacatttccactagcccaatggcattggttatctttataaaaagaacacagagagccctggcatgctacagtgccttcacacagcactctgcacatatggtgcacctgcactttagcctgaggtataccataaagaatacattctgtaaccattgtcatggtcaatgctattgttcaatatttgcccttcccaaaactcataaattgaattattccataatacaaggtgggaatatttaacaggttattggttaatgaaggctttgccttcaagaatgaattggtgcctttccagggtaagataatagacccttcttgctcctccttgccttaaacccttccaccatgtgatggtttagttcctcaatcttggactctctggtctccataagtttaagccaatccatttcttttcattataattccaaatgttggatgtgatgttacagcaggctaaagggtcttagagatttggctttttaaaatcattttacatattgctaataaatgagcatgatgatttatataaaaataactcattaaataagttcaatctaagggaagccattgatgtttgcatatttcaactcaatcttcaaaacaaatccatattcacagtttttttcagtcatggagaatctcacccttaatgatttttgaccagtagaccccttggctgcttcaactcattcacttttcccctcccttctaccctccttccctctatgtctcccattctctctctctcattcatatatatatgaaggctacatagtagtcactaaaacaaaattagtgatcaaatattagaagaaatattcttttaaaagactgagatttttactaagcaacttcaatgtaaatcagagaaaacttaatgtttatgaagattataccataagaaaacaatctatttatgagagaaaatttaagaccagtaacataatatacaggcaacctaaagaaggttttaaaacagagcactatgaaagaaggcaacattctgaatgtggcttggccatgtgttctaaagtactctatgctggacaagctgacacattcctacaatccctgcacctgtagaaaggaggagtgtgagttcaaggccagcctgggatacatagggaattgctgtctcaaaaactaaagaatgaagcacatagcgtgtctgtttaaaaaacaaacaaaaaacaaacaaacaaacaaaaaaatcttagctctagaaatgtctacctgcgctgctatccagtggctcacatctggagatctgtttggtggaagaataatgtgaaaatgaaggacatgcctttcattggaaaaactccttcctgataacaatatctctcctatcaggttgttctgcttgcacaatgtgatttgttccaaaatgtctgaatgtttttccttcttcacacaatgtgcatttgaagataaggacagctgatgtcaaaggcaggttgggggcaggggtaggaaagctgatctggctgccaagtcatcagagctgggcttacaccttgagctttttgtaaaagctttaagtatttgtcactgggttatgtgattttgttttccattttcctttatgccattgtttttaaaattttaaattcaaaataacccagtcagggaccatcatgggtagaaccacccctcaaaacagtatctttcatcaatttaaaagctctttgtttttgaaaacatattcttttgcttttatttttattatttgttgattggttgattgattttattttatttttttaagacagagtcttactattaactttggatggcctggaacttgctatttaaatcaggctagccttaaactcacagtgactctcctccctctgcctcctaattgctgggattaaaggtgtgtacaaccaggcctggtagtctggaagctctttaatttaaaagacaaaaaaaaaaaaaaaaaaaaaaaaaggatctgatagtttgatagtttgtatggtgatttgagtaagaatggctctcataaactgaaataattgaatgctcagtaatcaggggagtggtattacttgagaaggattagaaggtgtggcttgacatagttatggctttgatggaggaagggtgccatggaagagggctttgaggtttccaaagctcaggctaggccaggcccagtggttctctcttcctgctgcctgtaggtccagatataaaactcttagctacttcttcagcaccatgtctgcctgagtgctgccatgctcccagccataatgataatggtctaaacctctgaatgtgagcaagctccaaataaatgctttctttttataagagttgctgtggtcatggtgtcttttcatagcaatataacactatgacagtctggttaccacatagtgaattactatgctttttaaagtgtttccatttggtcttttattcctttatagatttataaataaggacatcgtataggggctgggatactggatttcaattttgtattttgacagggcctcctcttagtaatttttatcattaataaatcacttttatttatctttgtttctatataaataaatagtaactattaggtggtggatttggtctgtaaattggaggtgccatgtttgggggagtaaatacctgatgaggaaaaggctttctaacctggaccataggagcctctgaaacactgcatgcccccccgagaattgtaagtaaataaacacaatccatgagatgaaccaatttctatgtggaacacatctggatctttattttgtaatttcctcatattcacttctgacaaatagcaattatagaatgaacaatctcctaaattgactacttttatgtcaccttgacataagctacagtcattttggaaaagggaacctcagttgggaaaatgccccttctctagattggcctggaagcaagcctgaagtgcctttacttgactgatgattgatgtggcatggcctagcctgttgttgtagtgccacccccaggagggtggtcccaggtgctataaaaaaaataggccaagcaagccagtgagcgtgctcttcccccgctcctgcttcagttcctgattccaggttcctgccttgattttctgccccagctttcttcataatggattgtgatgtagaacggtaagctgaaataaatcttccctaccttcaagttgtcttgggtgtggatgttttatcccaagaatagaaactctaactaagacatttctctcaccccaagctaccacatatggcagcttttgtcctgacaggaactgggctaacagtacagtgtccctaaaagtttggagtattttaggattcgtggtcaatgaaacacttgacttgcttggttatatattcccccaactttaacaactggcaagtgtaattggctagatagtgtcttcaaaaagttcaagccagtatgaaactgtatcaatcttagaaacagagtctttgtagacataatatggttatgatatatatgcatatatacatatacgtacatacatacatatatgtgctgaaatggttgaattgcaatatgcccccaacaatcctatatatgtgaactataagccaaaagaaatcattttcccctaaaaacaagcaacaaaacaacaataacacaaaatacccatgtatattgcataactgtattccatgtggaaacgattacttaggaagttatttattatttataatatggcatagaaataaaaacctcttgtgttgtaaaacttccttccatgagaaattcacacaatatatttttaggtctttggtaactcagggtgacttcaacatttcaaggtacaaaaaaagtacttaaaattgcttagtccttgtaatcttcagtgagagtttttttttaatttgttaaattagctgcctacaaaatcttatacgtatatttagatttctgtcatggggcatttggggcagctccatatggtataatataatttatttacttcttatgaatatgcataaaccacccaccaatctggtctcatttcttaagcagagggattgttaagcctgtgctactttagtatgtgaggtttctgtaacagtccaatgtaaatgtagttagtggcaaagtatacctgataaaaacacttaccttcttattgatatagtaggggtccaggtcctccagaggctccgacaccatctctggaggaatgtctccatagataaatggaaggttcttcccagcttccaagtcactgtttggctttgggccattttcatcatcatcttttttgtctggcttgggattcttagccttctcttctgcaatgcgcctttcaatagctgcaagggattctctggtgaagaagttgaagctgtcaggtcctggtggtacaagcactgtttgctccatcttgtcatcctgcacattttaattactctttactcttcatgtgagattcctaaggagggaagaaccagaaacgtggagaacattaaaagttatcaatatcaataaatactcatctagaaaagtgggccagaagacttaaatttttttctcctccaaaatttaaatggaaaaaataaaaaaaatgtttacacaaattcattctctatgttgagctttggccaagcattcttgtatgtttaggattgtgctttaccaatagaggaactaggctgtgagtttaaacactggttcagtattgctctgagtacattttgataattgtcgccacatcactgataaactgttcactctgagatgtacctgtatgatgaagacgatgcccactgatagatcaatcaattcaaaggtatcacacacacacacacacacacacacacacacacacacacacacacacaaccaaaaaaaaaaaaaaaaccggaaccttgtctctgagatctaaaatgcagccattgaggcttaacaagtaaggacaaagcagtttaactttgttgcagtcaatcagaatcacataaaaagacagtcattgctacactacttatgcctgtgtacaccctgagatgtgggtgaatagatctatggcctgagaactacattagctctagtagagtctctttgacaatgacaatccaaggtgggacaaatgccattaatatggctgagatggacataaactaaactggaaaggaagctatgtgcacaggaggtagtagaaatgttcttagttcaaggaacaatgtacttttcttcaccgaaacaattctgatacatgggagagtctgcagtcctgcagatattaaggccaaatccaagatgcatccttttaaaggtatacttaataagaactcaaatttcacacatatatctgtgcccaaacttcccagagctcaagttctgcctggtacagactctgttttaatagtctgttagctcattaaagtcagcaagctcaatacaattagttgcagctttgatgtctaggtctctaatagaaaactacagcttcctcttcctctcctcccagtgttctccctccccccattcacctttccatttcttctcagagaaagtgaaacctcccattgatatcaaccctcctcccccaaccttggcatattaagatgtataagactagacatatcttcttctattgacactagacaaagctgtccaattagggggaagggatccaaagtcaaccaatagagtctgagagagcccctgctcttgctgatagagatctcacatgaggaccaagctgttaagctcttacatatgaatagcgggtcatcccatgcatgatgtcttgttggtggttcagtatctgtgagttgctatgcgaccaggttagttgattctgtaggatctcttgtgttctggatctccctggctcttcctctccctctttgacaagattccaaggtttacctaatgtttggctgtgggattctgcatgtattttcattagctgctgcatgaagccactcaaatgaatgttatgctagcctcctgtctgcaagaacagcagtatgtaattaatagtgccagaggtgggctccctctcaatgcaatggaatcactgtattttatctcactcattcattcagatcatcctgtctaggtatccctctcacctacttgatggttttgagtctaaatgtgcattgaattctatcttagtgtgtttatttgttcttctccttttttttctcttattctataaaccctatcttttggtttgtttatgactgttgagtttggatctcagcatgcaccaaaggtggagtggaacttgctccatggctcatactggctttgaaattgcaattatcatgttatactttcctaattgtttggattgtggtcttgcaccaccatctctgattttattctatcaattctagtgctgattctacttatttgatgtgtagataatacttatgatctgatatttggaagtgaactgaactatttacagccttatgtcacttaaaagcatgagtatatattgagaaaaaaatcagtagatgattttaatgtggaaacataatagaatacttaaatggacttacgtagtatagacaaatcactcaacattaatgcatcaaagagtccaatattcacgagacgtatgaagctgctatcagcacagtgtggcctgctcttttattaccttaaacatctttattagtagaaatatactctaaaatatgattaaaaagaatattatagaaaatccacaaactcttgacagagctgctgttatcatcatcgagtgttatgatacaagcataattgaaaggctgccatgatctatgggactggcagcagaagatgtctgtggatgccaccattacctcacatgtcctgtgttgtgccatgagtttaggatggatacatgaataagtattgggacttctaagctccactcatggagccagctttgagttgcaatctgtctgtgaccaaggcaccagtgtgcagtgcttgataatcctgccgagcacatagatctttgcttctctctctctctctctctctctctctctctctctctctctctctctctctctctctctctctgtctctctctctctctctctctctctttactgagaacaaacgtaaacacatatataagggcatttgtttgtttgttttttctcgtttgtatttctttgctgtttcataggtttagcattatcttttgtatgcaaatatttaaattttggattgcagcataatttaaatacatactaattgcatacaatttcagtctttctgaaagggtgcaacaacagggtccatttttcataaaattgtgtggacagaacagaagtggctacttcaagccttcctattcagtaaaaatgagcaacccacaagacctaacagtattatggtgtgcttacagccaggagcctagcatgtctaccctcagagaggcccaaaaagcagctgactgagacagaagcagaaacttacacccaaccaattgtctgaagtcagggacccctgtggttgaattaggaaaaggctgggagaagttgaggaggagggcgaccccataggaagaccagcaggctcaataagcctaggctcttgagatctctcagacactgagccaccaaccaggcagcatatactagctcatccaaggtcctggacacatgtacaagtaggacttcctggtctggcctcagtgagaaaagagcccctagctcttgagagacctggggctgcagggaatggagagacctggcaggggtgttggggggagtgtggggtgtggagaccccttagagatgggggtgggagggtggggaggagaaatgggatgaggaactgtctgagggcagaatgggagggggataacaacttgactataaaagaaaaatattaaatataattaaatataaataaaaagcagtataagaaaaaatgaaaaaaaaaaaaaaccttagggctattggctgtcagtatcaactgagtaaacaaacagccaaaaagataggcaaatactactgatgaatatgaccacttcaaatttattgttataataatgacctggttcagttacagtaattacactcatatgtgagtaatttaactaaatactatactgataacatattcaggttagggggaaagtatttcttactttctgattagaccttgtattcaaatactaccaaaaagtaaaacataagttatattaattataagaataataccatttcaagattgtgatctggggctaaagagatggctttgctaaaggtgcctgttcatgcctggtgaccttgagcttgctgtctgccccacagggtggatggagatgactgattcctgtgagttctcctctaagctccaccatgccacttttccatctccctccctctctctgtctctctctgtctctctctcttaaacaaacacacaggtacacacacgcacacacagatactagctaagtaaacaaataactgtaattttaagcatgatgacctgttccataaggttgcttatgaaatatctgaagctgtcaaatatccttcaatattaatgttttcaagcaatattatgggcaaaaatctatagattttagtttgaacttctactttctctatccagaaataaccattaggatagaaagaaaaagtttggatttttaacttaaaatttttaaacatttaaactgaaaactgagaatggtccccatttgtggaaacacatgcctcattagagatgtctcatttgaggaccatgtggcttgaggcttgtggcggtctctttactttagtgtgactttggatgccttggttacatagagcagcccgtgtacccttcagtagagatagccaacaaatcgtggtaagaaaagtgtcaaagagagagtaatattttaaagaaaaatataagataagaacttattcaaaatgcaaactcacatagttatgaagaaagaaaaatgatgcatttcattaacagacatacttaaaataataaaaagaagtaaattgccaagaaaaaaatgaattattcttttagaaaatacttttaaaaattaaatatagacaagtcattcgaaagaaggcaacaagaaacagtaaaatctcctaaagacactggaatagaagtgaggacctgagggctggagggatggctcagaggttaagcgcactgactgttcttctagagggtctgagttcaattcccagcaaccacatagtgtcttataacctctgtaatgggaactggtgtgtctgaagtgaataccacatatgtactcacatacataaaatgagtaaatcttttgaaaaaaataagtgaggaaaacatttaaaactaataaaaatttaattcacaatgggaaaaacagggatgaaagagaaataagaatgaattacttcattcaaataggaaccttctggctttatcgtcaccaacaattcatactttatcgtcaccaacaattcatactttatttctataacttttaaatgtttttctaaacctggtaatcccagctatcagttaatatggttattcaatatcagtacatcttagctatattatgccacataattttatgtgtgaagcaatgctatatgtgtagtgtcttctaaaatagcatggtatttatagtgaaaattagctggattcttgctaacatgatggtcagctcctgcaagccttaccactattttgaggacatcagtcctctagatagcacccttcttaattaaatttttggtctactttgcaaaatattctactgccaaaaattaaagtcaggtgaaatattattcttattgatattatctcacaaaaataactaaaatatttattagtgtgtgtgtatgtgtgtgtgtgtgtgcctgtgtgtgcacaagtgcattaagtgtgtatatggagacttgtgcggggcataaaactggaggtcagagagcaactttgaagagctgcttctttctttgtaattttatgtaaattcctaggattaaactctagtcaacaagtgtctttgcccactgagccatctccctgatcacttaaccactgactaattctataaggcttgcattgtacttagtgcattctttgttcttgaatcaaaaaccaaaaccaaagggacacaaattgaaaaggaagatgtcaaaatatcactatttgcagatgatatgatcgtatagttaagtgatccctaaaattctaccagagatctcctaaacccgataaacaacttcaacaaagtggctggattataaaattaactcaaacaaatcagtagccttcctctactcaaaggataaacaggctgagaaagaaattagggaaacgacacccttcacaatagttacaagtaatataaaatatgttggtgtgacactaaccaagcaagtgaaagatctgtatggcaaaactttaaatccctgaagaaagaaattgaagaagatggaaaaatctttcatgctcatgattggcaacattaatttagtaacaagggacatcttgctgaaagcagtctacagactcaatggaatccccataaaattcccactcaattcttcatagagttagagcaatttcaaatgcatttggaataaccaaaaacccagaataatgaaaattattctcgacaataaaagaacttctggggggaatcaccatccctgatctcaagctgtactgcagagcaattgtgatttaaaactgcatagtaatggtacagtgatgggcaggaagatcaatggaatagaattgaagatccagaaatgaaacccacctacctatggttacttgatctttgacaaaggagctaaaaccatccaatggaaaaaagcattttcaacaaatggtgctggttcaactggcagtaagcatgtagaagaatacacattgatctgttcttatctccttgtacaaaacacaagtccaagtggaccaaggacttccatttaaaacaagatacactaaagttaatagaagagaaagtggggaagagccttgaacacatggacacaggggaaattttcttaaacagaacatcaatggcttatgctctaagatcaacaattgacaaatgatatctcataaaatcgcaaaacttctctaaggcaaaggacactgttaataggacaaaaggcaaccaacaaattgggaaaagatctttactaatcctaaatccaatagagggctgttatctaatacatacaaagaactcaagaagttagactccctttactacagagcaattgtgataaaaacagcatggtactggtatagagacagacaagtagaccaatggaatagaattgaagacccagaaatgaacccacacacctatggtcacttgatcttcgacaagggagctaaaaccatccagtggaagaaagacagcattttcaacaattggtgctggcacaactggttgttatcgtgtagaagaatgcgaatcgatccatacttatctccttgtactaaggtcaaatctaagtggatcaaggaacttcacataaaaccagagacactgaaacttatagaggagaaagtggggaaaagccttgaagatatgggcacaggggaaaaattcctgaacagaacagcaatggcttgtgctgtaagatcgagaattgacaaatgggacctaatgaaactccaaagtttctgcaaggcaaaagacaccgtcaataagacaaaaagaccaccaacagattgggaaaggatctttacctatcctaaatcagataggggactaatatccaacatatataaagaactcaagaaggtggacttcagaaaatcaaataaccccattaaaaaatggggctcagaactgaacaaagaattctcacctgaggaataccgaatggcagagaagcacctgaaaaaatgttcaacatctttaatcatcagggaaatgcaaatcaaaacaaccctgagattccacctcacaccagtcagaatggctaagatcaaaaattcaggtgacagcagatgctggcgtggatgtggagaaagaggaacactcctccattgttggtgggattgcaggcttgtacaaccactctggaaatcagtctggcggttcctcagaaaattggacatagtactactggaggatccagcaatacctctcctgggcatatatccagaagatgccccaactggtaagaaggacacatgctccactatgttcatagcagccttatttataatagccagaagctggaaagaacccagatgcccctcaacagaggaatggatacagaaaatgtggtacatctacacaatggagtactactcagctattaaaaagaatgaatttatgaaattcctagccaaatggatggacctggagggcatcatcctgagtgaggtaacacattcacaaaggaactcacacaatatgtactcactgataagtggatattagccccaaacctaggatacccaagatataagatacaatttgctaaacacatgaaactcaagaagaatgaagactgaagtgtggacactatgcccctccttagaattgggaacaaaacacacatggaaggagttacaaagacaaagtttggagctgagatgaaaggatggaccatgtagagactgccatatccagggatccaccccataatcagcatccaaacgctaacaccattgcatatactagcaagattttatcgaaaggacccagatgtagctgtctcttgtgagactatgccggggcctagcaaacacagaagtggatgctcatagtcagctaatggatggatcacagggctcccaatggaggagctagagaaagtatccaaggagctaaaaggatctgcaaccctataggtggaacaacattatgaactaaccagtaccccggagctcttgactctagctgcatatgtatcaaaagatggcctagtcggccatcactggaaagaaaggcccattggacacgcaaactttatatgccccagtacaggggaacgccagggccaaaaagggggagtgggtgggtaggggagtgggggtgggtgggtatgggggacttttggtatagcattggaaatgtaaatgaggtaaatacctaataaaaatggaaaaaaaaaagaaagctcagcactacaaaaaaaaaaaaaaaaaaaaaaaaaaaaagaagttagactccagagaaccaaataaccctattaaaaatcgggtacagagctaaagaattctcaactgaggaatcccaaatggtagagaagcacctaaagaaatgttcaatccgggcgtggagaagcacgcctttaatcccagcacctgggaggcagaggcaggcagatttctgaggtcaaggccagcctggtctacagagtgagttccaggacagccagggtgatacagagaaaccctgtcccaaaaaaccaaaaggaaaaagaaaagaaaagaaaagaaaagagaagagaagagaagagaagagaagagaagagaagaaaagaaaagaaaagaaaagaaaagaaaagaaatgttcagcattcttagtcatcagggaaatgcaaatcaaaacaaccctgagattccacctcacaccagtgagaatggctaagaccaaaaactcaggttacagcagatgctggtgaggatgtggagaaagaggaacactctttcattgctggtgggattgcaagctggtaaaaccactctggaaatcagtctgttggttcctcagaaaattggacataagactacctgaggacccagctataccactcctgggcatatacccaaaagatactacaacatataacaaagacacatgttccactatgtttatagcagccttacttataatagccagaagctggaaagaacccagatgtccctcaacagatgaatggaaaattggtacatttacacaatggagtactactcagcaattaaaaacaatgacttgatgaaattcttaggcaaatgaatggatctggaggatatcatcctaagtgaggtaacccagctacaaaagaaccacaaggtatgcactcactggtaagtggatattagaccaaaagttcccaatacccaagatacaattcacagatcacatgaagttcaagaagaaggaagatgaaagtgtgaatgcttcagtacttcttagaagggggaacaaaatattcatgggaggtagagggtaggggtgacttgggaggaagagaggaagaggagggggaaagggaggcaggattagttatgagaggagatggggatgatatacagaggggcaggaatttgaacagaggtgtgtagcaatgggggatagggaattggggatatccatcagcaagtcccagatgccagcaaagattggggggaatgagaccacccactcatctcaaaattcttaacccaaaagggttttcttgtctaaaggaaatacggggacaaagtgtggagcagagactgaaggaaaggctatccagagactgcctcacctggggacccaacccatagacagacactaaacccaaacactattgtagatgctaagaagtacttgctgacagaagcctgttatagctgtcccctgagaggctctgccagagcctgacaaatacagaagatgcttgcagccaaccattggacttagcacagggtctctgacgtaggagttggagaaaggactgaaggagctgaaggggcttgcaaccccatagggagaacaacaatatcaatcaaccagacctccctgccccagagctcccaggaactaaaccaccaaccaaagagtatacttggagaggtccatggctctagctgcatatgtagcagaggatggcactgtctggtatcaataggaggagaagcccttgatcctgtgaaggcttgattttccagtgtaggggaatgccagatcaataaggtggtagtgggaacattctaatagaagcggagggagtagggatgggagaggaaaccagaaaaggggataacatttgaaaagtaaatacataaaaatccaataaaaaagtagacaacaaactaaaacaacaacatcaaaagaaagaaaggaagaaagaaagaaggaaagaaagaaagaaagaaagaaagaaagaaagaaagaagaaaaaagaaaagaaagagaacaaaattttttttttttaggtcaggatctcttttcctaaccctgactgtcctggaattcattgtccagatcaggctggccttgaattcacagtggccttcctttgcctcctgagtgctgagattaaaggtgtgcaccatcatacccatcctcaaaagctattttgacagaataaagtgctgatatgttctcagatcaagagcctaaaaaccattaggaaattctttatatactatcaatttttgagaaatatacatttgtataagctctgtttttatttgtggatgtatatatgtattttttctgtgttatttctattatgtagtctttacttgcttgaagtttcagtttaatgataaatgccctcttctctcttgaaagtgtcttaaatgtatctcaaatatgatgccaaatattctggtgtaggggagagaatgatatggatgagcagtgagagtctttaggttggtaaggagattgcagggtcataaacaggatgacacagtctaacagggcaatacacccagatgaaaggtgtagcccagattaaaggtgtgttccttaaactcggagattcaatcttctggaatccattgccactatggctcaagatcttcaaaccaagatccagataaggatctccaagcctccaaataagggtcactggtgagccttccaattccggattgtagttcattccaaatattgtcaagttgacaaccaggaatagccactacaatccaccccttgtcaacttgacacaaataatatctcatgttcacatgaaacaataacaaggttgtaaatatgcctaacatgatataactatctctcgtacaatcgcaaatgcattagtaaatttacaatgggcattcactaaaaagacagagaggccaagacgggtttgatgaggtgaagtggcacttcttgatattcagtcggggctgatacccaaatatccacttagttggaggagaattattcacctgggtgtttaacctgcaggcctccccaaccagtggaaatcctgctatgctcttcttgcccttgtataattttgagtaatagacttttgtgctgatggaatgagacttataaactctagtcaagctttctctgaagcactgtgtgtctacatagcctcatgctctaggtcctttgctctgagaatggtatatctcaaatgggtgcttcttcctcagtctggatcctggaataagaagacacattcactggatgtcaagagaaagctaataggactcaaagggtctaaaagtaacgatttatcagtgatgtttgacagtgatattactaacgagcaagtgtatgccattgatcaaagaccaggctgctaaatgagttgaattaattaggaatatttgtctctcagacacaaatgttgccagagattagatattccacacctcatgagtctccacctatagttctagatgaggaacacattatcattaggcaatcagtgaaatcatggccttctaacaatcatatagcaactcaggaaaatttgttcaaaggatgctaaatagcctatatcaagaatacaaagagtgggctggggagtagttcattagtaaagcagttgccatgtaagcatggatatctatgttcagatcttcagtacccattgaaaaagctgcagcatcatccaatgcctagaattccagtgctggaggagcagagacaggggcatcatgtgggcctactgccctgacagtccagctgaatcaagaattttaggttcagtgagagatcatgtcacaaaaactaaggtagaaagcaacagagaaagaagtgtgatatttatctctggtctctctatgcacaagaacacacacacatgctcatacacaaacactccacactcctgggtatatacatgtctacactcatgagcacatacatgcataggcacaagcacacactcccaaacagggatacatacaaaaacacacaacaaagaatatgtattatcaatcagaagccaattatttaagttaagtagtaaaaaattcttctactaaaaagacaaccgtaccatggtgaggaaatggtccagtcaatgatatttgctagaactgtcattgtccatccatgtgtctatgctgcagcatttaagatatcaagaaggagctggcctagtgagaacagaaaatctaacatggctgctatagcttactgactagaagttaagtgcacacttcctaaaagaaggctttgacacaagccacttcagttccctcctcattttcttgtccccattcctctctctgtagaattctgagatttcaattcagttttatacagaaaccacattactgtaagccctacaaagttatggcaatatagctatatggagtcaagtaatgtaggttatttttttcccaatggtgctggtgaaggtggcaattatgtagctatacttagcagactgaggaaattctgctagagtcagcatttgtctcttcattgctatgaaacagtaatggaaaaataaacaaaaacaaaaggcaaacactatgcataattccctcagatcatattaacatgtgatgttggagtaaattgttataaccccattttggaaatacttaccttaattaactatgatttccttaaaataatgcagtatttacaatctatatgaaagcactatatgggacacatggtatgatggaacagtgcacccaagagacaccaagaacattcctgtctgtggcagtcttttctctatacagaggcatttagtctcaattgctcagagttattttacgttttcagtgactttcactgttcattcgtgtgcatattgcctggacaacacaggatgaaaaatggtccaagagaagtctttgacttgctaaagcaagaaagatgtttaaaatatgcgacacatgaaatatcccaaaaagtgtagaattctttttgagaatgttgatgtctctttagcataaagctaatttgaaggtgtccttcttatcctaatattttcttacaaaaccagctcatctcaaagcaaaagtgttcaagatatagttgatggagtaaggagtttagcacacagaacacagggacagctacagagaaacagcaaatagccaaggcagacataaagaggctgacaagacatgagagagaagagtattaaacacagatcagctacctggaaaatggctctctggtgttccacacttcctctcatctggatgatctagaaacacagtaactgctctgagttaagaaagcctgagaccagcagtgtgtgggtggcctgcattaagttgattgataaacattctacatataaaatctgtacccttcacaagtttggtcaatgacacaattctattgtaataccatagactcatgttcaaagaagaatcatttaaggacagagtgtgctgaaagaatgtataggaaataagtcacaaaagatgacataatttcttgatttaaaacctcacaggatcataggatcagaggtgaggaggacacaacatctgtcaaaacacaggaattaactaggaccaatgggacccaggcacacaggaactccaccagatcagtggcacaagttccttctggtctgtctgggtcagtgccctgagcagaccttgggcttgaacttcacagccagtcccacaacacccagaggaagctccactcccaagtgctctaacatgccgaggatcacaggatcacagaagcttggtcacaccaggatctcagggtcccagaggcagcttaactcccaggagctctgacccattcaggatcccagaaccacaggatcacagagacagcttgattctgaggagttctgacacaaccagtatcacaggaaggatgagctccagtcagatatagccagatatatcaggtagcactagagataatcagatggtgggaggcaagcataagaacataagcaacagaaaccaaatttacttggcatcatcagaacccaattctcccaccatagcaagtttggatacaccatcacaccggaaaagcaagattcagacctaaaatcacttctcatgatgatgatagaagactttaagaaggacataaataactcacttaaagaaatacagttaagcaggtagaagtccgtaaagaggaaacacaaaaatcccttaaagaattacaggaaaacacaattgaacaggtgaaagaaacaaacaaaccctccaggatctaaaaacaataaagaaatcacaaagggagacagctctggagattgaaaacctaggaaagagataaggagtcatagatgcaagcatcaccaactgaatacaagagatagaagagagaatctcaggtgcagaagataccatagaaaacattgacacaacaatcaaagaaaagacaaaaagcaaaaagctaatccaaaacatccaggaaatcaaggacacaatgagaagaccaaatttaaggataataggtatagcagagagtgacgtgttccaacttaaagagccagtaaatatcttcaacaaaattatagaagaaaaattccctaaagaaagagatgcccacaaacatacaagaagcctacagaactccaaatagactggaccagaaaagaatttcctccagtcacataatcaaaacaccaaatgcactaaacaaagaaagaattttaaaagcagtaagggaaaaaggtcaagtaacatataaaggcagagctatcagaattacagaagtcttctcaccagagactatgaaagctagaagatcctgggcagatgtcattcagactctaagagaacacaaatgtcaacccaggctactatacccagcaaaactctcaattaccatagatgaagaaacgaagatattccatgacaaaaccaaatttacacaatacctttccacaaatccagccctagaaaagataatagatggaaaacaccaacacaaggagtgaaactacaccctagaaaaagcaagaaagtaatctttcaacaaacggacacaaacataattccacctttaacaacaaaaataacaggaattaacaatcacttttccttaatatctcttaatatgaaaattaatattaccaacatatcttaatgaattgaaattcaaatatatgaggaattagaaatttgtcggctgtcttccagtggtctctctaatttggtaatgggagaaataggtccaatattatacaatccatatacactttctgcttgtttgtatatgacaaagtctagctgtgtaccacacaatggtcttgaaatcatgcttctcctatctcagcatatctatttgtaggattgtttatttaatgtttttacactactctatggttttcagaacagcttacatatttcaaaatcatgtatacagcccaaagaaatatagaaaattaatttgggaggtagcttgtaagagaacaacaaagagtgagactgaacttttttttgatatttataattattgtatcaattttgaagaagaggaccttataagttactttttttctgatatgaatgtttttcagaattatcacagtcaaaggaaccagaatcttacactcacctaatgtctgtgccaccctccaagcagagccattgttcattgaaacaattgatgaatgactccatggatagaccatcttaatacacaccatttcttaaatgaatgtaacctgctccctgtaggctgagaatgatgacaatcactcaagtcaaatagttttgattatagaaggaaatatgtatccaaataatcgtgcctgcaattcattccttggtgcagcagaactgtcaactcttagcttaactactatggaggtaaaatcctttggtgatgtgagggacattgaagtacagactaattacaatgaactccaatatctaaaaattgttcttattttgggtttgtaccacagtaagagtcaagattttaaagctctactaaaaacaaaacaaacaagtaaacaaaatgactttatttatgttcatttaataacatgtcgatcattttatgattggtataaaaatatatattgtgctgaatatgataaaaaattagttcacttaaaaataaaataaagactcactattttaattgcctctatgcagcatttatcatatatgatatcaaattacatctaatttattattcaaaactatactggttagctttcaatctgacagttaaagtcagtcaaccagtgtttcttttgtgatgtactggactgatttatagagacccttctgggattcttagctttctgtgtggtcaccagctaatgactgtcagctctgtacaaaggacacactaccagatgccaggacatctgtcacagcagctaggacacagagccaaatctattcttgtcttgatgtatgacacacaatatgtacaatcagttttgttcattttgaaagtattctttaatatatgctacagacaagaccctgcaggacagtgaagaccgtacggtggcagggggagtggaaaataacatagtattgggatcttgagactaaagcaattttcttcacaagattctttatgaaatcagctctgagattttgatttgttttggaattttgatgtttctgaccttaatggagtgatgtattagtcccagaataggtgaaaatgaaggttaaacatttttggcatcaacttaaaatacagaaaacctcttttgacttcttgagtctgtttgtatgtgtgtgtgtgtgtgtgtgtgtgtgtgtgtgtgtgtgtgtgtgtgtgtctgtgtgtgtgtgtgtctgtgtctgtctgtctgcctatgcatctgtgaaaaggcaaggagcagtaacactatcctgaattattactaatttatttaaaggtaaaagaataaacatcatgtaacctctcttaataaatctcacataaagtggttttttttctaacaatagattcacattttaattcttatttcaattaaagaacttttgatgcattaagctcaaaaccataaacatgtcagataacagaacattaagttcaaggaatatcctacactctttagttctaactagttttgaagttatgttcctttttctcatagatcaaatggtgaaaaactataaaatagtactattaatatacatatgagagatttggtttctgaatctatgccttttctcctactcagcatgtcttctaacattttttggctatttttttattggttattttatttatttacatttcaaatgttatcccctttcctggtttcccctcaggaaacctccattctatcttctttccccctgctgctatgagggtgctcacccacccactcctgcctcactgtcctagcatttccctacactgtggcattgggccttcataggaccaagggcctcccctcctcctgatgcccaataaggtcatcctctgctacatatgtggctaaagccatgggtccaaccatggttggtgttttagtctttgggagctctgggggtctggctggttaatatttttgttcttcctatggagttgcaaactcattaagctccttcggttcatcccttaactcctctattgtggtcccaatgctcaatccaatggttggctacaagcatctacatctgtattggtcaggttctgtcagaacctctcaggagacagctatatcaggctcctgtcagcaagcacttcattggcatcagcaatatagaaaatgtggttacatttacacaatggagtactactcagctattaaaaacaaggacttcatgaaattcttaggcaaatggatggatctagagtatatcatcctgagtgaggtaacccagtcataaaagaacacacattgtatgcactcactgataagtggatattaggaataaagctcagaatactcaagatacaactcacagaccacaggaaactcaagaaggaggaagaccaaagtgtggatgcttcagtcctacttagaagggggaacaaaataatcactgaaggtagagggtgggagggacttgggaggaggagagaagggggaagaggaaaaaggaggcaggatccaaaatgggaggagacaggggagatgtagttcagatgacaggtcaggagtttgaacagaggtgtgtagcaatgggggatggggaactggggatatccaccacaaagtcccagatgccaggaaagcaagaggctcccaggactctatggggatgaaattagatgaaatacccaacagaggggagagacaacctgtagagaacacatctgaggttaggcatggcccccatttaaggatgtggctacctacccatctcaaacattttaacctagattttctcttgtctaaaggaaatacagggacatagagtgaaacagagactgaaggaaagaccatccagagactgccacacttaggaatccatcccagatgcagtcttcaaactcagacactattgctaacatttcttttttgtttgttttgttttttgctttttgtgttttcaagacaggttttctctgtacagccctggctgtcctggaactcactttgtagaccatgctggccttgaactcagaaatccgcctgcctctgcctcctgagtgctgggattaaaggcgtgtgccaccacgcccagctcaacatttcttaactatgaaaaaaataacgtttttgttatgctcaacagcaggtggcagctgacaaagtataattgtatgtggtcctgaaacattgtaaataattttaatgttattataacattcaacaaaaacacccaaattatttttccttctacttaaatctcaaaattatgctaccatctctaatctcaacacaataagtgaattctgaagcaactaagctaggtggggcattattggttttagtttagaaagcacgcacagttagtctactgtagcagtgcccatttgtggaaatttctgctcctttcttcatagactcctgggtggaagaaaagtgagacctcaacaacagcacttcatctggaactcaacttccagaatggagattgaaaaatataaatcaccaaaaccaaaggggagttttatgtcagtgagtccatgagagtataaatgaccacaatgacttaagaaatcctcatagaaggtaggcaagatggtttggtatataaaggatacttgctgtcaaatctgatttccagccctggagaccaatgagtgaagaagagaaccctcttctaccagccagttgtcctctgacctctgcacaacacacacacacacagggggggggggggagggagagagagagggggagagggagagggagagggagagggagagggagagggagagggagagggagagggagagggagagggagagggagagggagagggagagggagagggagagggagagggagagggaagtgtaagaaattcaaaagacatccaaatgggttgccagaaaaaaatgcagttacgtttgtatttgtaataaacaacactatttttgtacttcagaataaatagcaggacatctagctatactgatagttaattattgtttattcgaaattcacttttacctggacagcttgctaatttctttgacaagtctggcacgcttacatctgaggaaagtctaccattctaaaatctctctgcaacttgcctgaaatccagttaactcactttagcccttcagcttaatataaattgccatttgaaatacacacatatgtctgaggcatacatgagctgctcatgcatcaccgtaaattaatttaaagaaatttaaaaagactgatgactgatttcttctcaatatctaattttttttttgttaaagaaaattcctgtgaagcagctgtatgtgcaaaggttgtgaggctgactaaaactttaaaaactgtggagggtaagggatgttgctgaaccaggaagcttacttcaagtttccttggagctatctttttttttttttttttttttttttggagagtagattcttaaaacatccttaccacaatatatcctcccttcactcttcccatctcctccctacatcttctcccctgcatatccactccccctgcatttcttcttcagaaaagaactggccttcaagagagtacagaagaatgggacaaagcaagatacaataagacaaggcaaaagcccgcctatggaggctggaaagggcagcccaataggaagaaaagatccccaagagcaggtgaaagagtcagaaacatacgcactcccaccattaggaggtaccacaaagacaccaaactcacagccataacacataagcagaggacccagtaaggacctacccaaatatcatgccattttagtctctctgagcccctgtgagccctgcttagttgactccatgagccaatgtttatcctctctgactcctaccatctttacccacttcttctagttctgaggggttctcctagctttgaagagagagatccaatggagacctccaatttaacctctctctcaacacaatgttttactctaggtctctgcacctactcctttggggccatttttctaccttaaggagacactccttgctcaactctatatcagtcctaacatgttgataagcagattttaaaaaaataaataaacaacaacaacaacaaaaaaaaccaaacaaaatcactaccactacaacagcaaaacctttgtaatgtattaacaaaattttattcccaactaacggaagagctcagtagttatcagataacatctgaggcctatctgcctggctgcagtctgcttctctgatatacccaccaatgaattttaaaattaccttgattcatgacttttacttttctgctattatagaacttggtgaaacagtatccacattggaacatggaattagggtaacttagtaccctgtttgtaagccatggccactcaaatttggctccaaagtaaacaatctcttattccctttgaatggtatattagttgcttttctgctgctgtgataaaacactgtgaccaaggagagttacagaaaagggagtttattctagtttatggttccagagaattagagtccaagatggtggaatgaaaacaagggagatgaagaagtaactgagcgctcacatcttgagcaacaagcaggaatgacaagcattttttgtttgcttgcttgcttttggcaaaacaaaacaaacaaataagaagctctcaaagcccagtcccaggaacatacttatccaggaaggccatacctcttatgactccccgaggtccccaagtggagactaatcgttcaaatgcttgaggttgggaagtgtatctcacccaaatcttcaaaaggtgggagctctattttttgtatcaatgtttgccatgactaattcgggtctgaggatataggagatttggtttggttggtctggttttgaaaggggaagaacacaggattgtctgtgaaatgttaattcaaactcattttaacggttctgttcttataggattatcatgtgtcagggaatgctacattgaaaacatgagtttggagaaatgaaatgagatgtaagttaaaagatgtaaagtaggggatatatagggcggcaagtgtgagagcaaatgtgtaacatgaggacaatagttaatggaatggtgtcatagtcaagattttataaagagtacttagctggccttgtcaaaaaaagtacctatataaactgatagacacatttatctgtttcatgacagtgaacaattttaccattctgtacgtatccaataagatcatattgatgctttaaatgtacacagtaggaactacttgccatcaaagaaagaacaataagtatgacatgatagagcataagaaagctctttgactccataatttaacttgaaatatgaagccctcagaagtagagctgttgtagattatgagaaatgttataacaggggcaattgattttcataaacgatggagaaagtataataacctagtaaacaggtataatttattccatagtttgatttttttctaagaggatgatttctcttagaataagttctctttggagaatgggcagttattattattgatgtaataaaaataaaattactctgtgtttctggaggagaagatgaagaagaaaagggtgaagaaagaggaggaaggggaaaaggaggaggaggaggaaggggatggggggatggttacaaggggcaaaatgttcacagtgagtttatgggtctgtgccttttttttttttttgtccacatggaagtcttgttgtccacgttggaaatgcagatttctctctgctccagacataatggagatgaatgcctataagtaagagctctgtcattaaacatggatcagacattccccaggcacaatctaatagaaaagaaaaacagaaaaacagaaaggagtcagaatagggggatcaatctgaagaagagtggagtgaaacggtttggaaatcgaaaaggcaacacaaagaataatgacaggtcagagaaggtgacaggcttaaaagatacaaccaaataattccattttcatgactccatggtgaagatgaaagaagcagaagccgtttcaaaagctaagccaggcaagagacttgggcactgaccccaaggacagtctcacagcactcacaggtttcaagtccatctcagttcttggtgagacagtggtcttccattgcacaggtctgtggcagtgaaaattcctatttagtcactctatgggaaccagagtgtaggctctgaaagatcttgaaagtctattgctaaaaattgagctaagaatggaaggctacgaatttgggaaggagaacttaggagagcacaacatgggaggagttagaaagatgagaaggaaggggaactatgcaaatgcagtattcacctacatcattttcaatgaataaattttatttatttatttacttatttgaagggattaaaaacaacaacagaatcctgagataaacagggaaagaaagcgcgggggaaaaaccataaccctgagagtctggatttggcctgccacagacctagagtagaagaggcccaggaaggacaagatgtcccatggagagcaggatgcccgctgctgataaactacaggttcagttggaagggagctcagtttaggcaggaagtaagtgcataaggaaagaaagccctaccattagtatctgggaatagttctcatcaactgagagcaaaccttgtatggagaactgagtctgaaatcagtgggtagatgagcagcatgaaccatttctttgcctgatggccacagagcctgagaactcaagttccagccatgaaatacagagctatattctactagtaggctcattgataaacttagaagttcttgcatgcatgaagacaggctctccatctatctagaaaatgtcttctatggtcacttagcacatgcccagtgcacttgggagatacctcacagctaagacattggctatctcaggggatgcaatctggattgtctcagtggggtgacagcattttcccagcacacagacttaaaacctgtgtactctgatatacaaagggaagccaccaatctgaaaacaactctggtaaccagcagagagtgtccaacagagcatcaggaaacttaaactacaggcaagacatcagcccacagtttaaagggctatgatccccaccatgtcatgtaactggtaatctccaattttctaggacctagaaggaatccattccagcacttcgcacacacaccccttctttttaactctggggattcttcactttccctcttgtcattgttaagctgttagaggcacttttattgtagtcttaaaatttgtcttttattctcatcatttaattatctcattttgtttatgcatatttttcattattgggtaatcttgatttttttttcctttttagagtgcttcttcttattccttatccttttagaagtattctgatcttaccttttattattttaactggaatttttaaaaaaaattttttttctaacttcttaccctgtcctattcttctttatgatattcatctccacttggttcgttttttcctctttaagtggtcttcacatctctactcccttttctgtctccttccttatctctttcacttactgcatccacatttacctcaactaaagagtatgactagatcttgaatggtttgatgttggtgctgttagagcagtttgctctctccactctaactggaactggtgaccaaactctccagagtaagctgcttagccccatgtggtggaacataactgtggttgtagaaccgagggggctgaggcaggagcttagccccgtgtggtggaacataactgtagttgtagaaccgagggggctgaggcaggaggatcgggctttcaggtcacactttgctacatagtaagtttgcagccagcctccttgtgagatgtctccaaacacacagaaacaaaagaggaaaaggagaaaaaaatgactgaggtattcaatatgaaatactcaaataaaacttcaagagatgggacaaaacccaaaggtataagaagtgtagcagagaaactcaagaatgtgtcaaaggaaacagtatttcccccaaaaggtcataattctcggcttctcaaaagacatggagatttgttaacatctagatgaagacttcacaagtttatttgatcaatgaattccgagaggatacaaacaagcagatgaattcactcttgtatttgcggaggaaagtcaacaacacagaagaatatgacagtgggactgatgagcaaaactctaaggtacacagaaaatgtcagcaacatgaaagaaagattcagaaggaaaattgagtttttaggggttttttttgtttttgtttttaaatgaagaaaccaaaagaaaacaaacaagccattggaaaaccacacgacaaatgatttaatgaaggagaagaaggaatattactgaaacaacaaaaacccactaagagaacagacaataacaaagcaattttacaccaactaaaaaaagaaacaagtaacaaaattataggaattagtaaacatctctcaagaagaataacattatatgtatatagccagaactcactaattaacacagattggccacctagatgcctgtatgaagacaaattaacaacaacaaccacaataaaaacattgaccctgttactatctccaaaaaccacaccttatgggtaaagtcagccactgttggagaatgagacaatctaacaagtgagtgaaatctgaaaagaatttagctgtcctacatttaataaggtagacattaaaacaaattagacagaagacataaagaaggccaagtgagcaatgaaagggacaactaattaagatggtatattaattgaggcaggcatggtgtcacacacctagcacacggtagacagaagaggccaatctctgtgattttgaggccagtctcattaatagttccaaaacagagctacatggaaagactgcctcaaaaaggaaaaagagatggaggaggagaaaaaggaggagaaggaggaggaaggagaagaagaagaagaaggagaaggaggagaagaaggagaagaaggagaagaggaggaggaggaggaggaggaggaggaggaggaaggggaagagacaaaacaaccgtagatacacatcaaattttagaattcttaatttcataaaacactaatggagacaaaatttcagatacactcaaataataatagttgataattacaatatcatacaataatttttagatgcattactcaagctgaaggtcaataaagaaatttaaaatataaataggacaaaatgacttaaaggatatatagagaatattcaatccaacatatgtgtttataaaagatacacattgttctcagccgcctatggaagcttcctttaataggtaacatgctacatggcaaagcaagtcttaaccaatataaaagaatcaaaataattccttacgtcacgtcagatcacagaggaggaaaatgagaaatcaacagtatgagaaactacagaaaatacagaaatacattatactcttttgtatgtgtgtggtatatatgtgtgcatatgttcaagtgtatgtgtgtgtacacttgcatgtggatgtgtaagtccattcatgtggaggctagaggtcaaagtatgtgtgccaggggctctttcttagtctcttgctcagtttttaagacaagtctcttactaaacctgtggcttgttgatttggctagattggacgggccagcacattcccagcatttccctttctctgcctctgcaaagcttcagttacaggcatgtgctgcccctttagccatattatttagtgctgtggatatgaacacaggttctcttgcctcttagactttattgacagcctctaaaaaggatacttttgaataacaagttggacagtgagggagtcagagaggaagcttaaaaatggctggaatcacaagtaaaaacacaccctaagagaatctttggaatagaaaaagcagttctagaaggaaagtttgtagctctgagtggttatattaaaaactcagaaagagctgggcatggtggcgcacggctttaatcccagcactcgggaggcagaggcaggcagatttctgagttcgaggccggcctggtctacaaagtgagttccaggacagccagggctatacagagaaaccctgtctcgaaaaaaccaaaaaaaccaaaaaaccaaaaaataaaaaaacaaaaacccaaagctcagaaagatttctccacagtgagtcacaactggctaaggtatagagatgaagaacctgcagaattctcagcccaaagggaacataattactgtaacccccacccctcaaggcttagggatgaacacagaagagtctgtggtggtggatgccgaccacacgaagcattatcatctgaacactgcagaggcgctacacataggaactcagttctttttcggcggagtatacaggtatatatactgtatatagccagaccaaatcccagcagggagaagggagttgggcacaatcctagccaaactctggagtgattgacaattgttagctgcgagtatagtgtaacctctccttaggtgagtactctccagtagaagacaacacatcaaaaggctttgcaaggctaaaaagacaatgggtacaaagttacatggataaagaagtggtgttgaacccttctcaatagtcacaaataatataaaatatcttggcatgactctaactaaggaagtgaaagatctgtgtgataagaacttcaagtctctgaagaaagaaattaaagatctcagaagatggaaagaactcccatgctcatggattggcaggatcaacattgtaaaaatggctatcttgccaaaagcaatctacaaattcaatgcaatccccatcaaaattccaactcaattcttcaacgaattagaaagagcaatctgcaagttcatctggaataacaaaaaacctaggatagcaaaaactcttcttaaggataaaagaacctctggtggaatcaccatgcctgacctaaagctttattacagcgaaattgtgataaaaaccgcatggtactggtatagtgacagacaagtagaccaatggaacagaattgaagacccagaaatgaacccacacacctatggtcacttgatcttcgacaagggagctaaaaccatctagtggaagaaagacagcattttcaacaaatggtgctggcacaatgggtggtaattatgtagaagaatgcgaattgatccattcctatttccttgtatgaaggtcaaatctaagtggatcaaggaactccacataaaaccagagacactgaaacttatagaggagaaagtggggaaaagcctcgaagatatgggcacaggagaaaaattcttgaatagaccagcaatggcttgtgctgtaagatcgagaattgacaaatgggacctcatgaaactgcaaagcttctgcaaggcaaaagacaccgtcaataagataaaaaggccaccaacagattgggaaatgatctttatctatcccaaattggataggggactaatatccaatatatataaagaactcaagaaggtggactccagaaaatcaaataaccccattaaaaatggggctcagagctaaacaaagaattctcacctgaggaataccaaatggctgagaaacacctgaaaaaatgttcagcatccttaatcatcagagaaatgcaaatcaaaacaaccctgagattccacttcacaccagtcagaatggctaagatcaaaaattcaggtgacagcagatgctggcgaggatgtggagaaagaggaacactccttcattgttggtgggattgcaagcttgtacaaccactctggaaatcagtctggcgattcctcagaaaattggacatagtactaccggaggatcccacaatacctctcctgggcatatatccagaagatgtcccaactggtaagaaggacacatgctccactatgttcatagcagccttatttataatagccagaagctggaaagaacccagatgcccctcaacagaggaatggatacagaaaatgtggtacatttacacaatggagtactactcagctattaaaaagaatgaattcataaaattcctaggcaaatggttggacctggagggcatcatcctgagtgaggtaacacaatcacaaaagaactcaaatgatatgtactcactgataagtggatattagcccagaaacttagtatacccgagatgtaagagacaatttgtaaaacacatgaaactgaagaagaacgaagaccaaagtgtggacactttgccccttcttagaattggaaacaatcacccatggaaggagttacagagacaaagtttggagctgagacaaaaggatggaccatctagagactgcatcatagagatgccagggatccatcccataattagcctccaaacgctgacaccattgcatacactagcaagagtttgctgaaaggatcctgatatagctgtctcttgtgagactaggccggggcctagcaaacacataagtggatgctcacagtcagctattggatggatcatagggcccccagtggaggaactagagaaagtatccaaggagctaaagagatctgcaaccctgtaggtgcaacaacattatgaactaaccagtaccccggagctcttgactctagctgcatatgaattaaaagatggcttagtaggccatcactggaaagagaggcccattggacattcaaactttatatgccccagtacaggggaacgccagggccaaaaagtgggaatgggtgggtaggggagtgagggggagggtatgggggatttttgggatagcattggaaatgtaattgaggaaaatacgtaataaaaataatgtaaaaaaaaaagaaatggtgttgacttacaaagagccaagagaggagtcaaatatggtcaaaccacattattttgcagttctcaaagaagtaataaaaaaaatcgaacacatttcctaatattgtacatcaagcacttacaaaagtaagaacaaatcatatgccctaacaagaaacaataataatcagtgtgaaaattagagagaagcttaaaagcaatacataaaattaataaaacactgggataatcctttttaaaattaaaattgacaaagataaagaaagagaagattcagattagcaaaattataaatgaaaaagggaaggccatttcagtttctaacacaatttaaagaagcattagagaatattttaaaaagctgtactctgaaacctggcttctaattttagcagaaacctcacatagggtctccaaagccaactctgagcctggttggtaaagctttctgtccttgctagtcagtttcttatcattaagcaatctgggattcaaagactttagcagtgaatatttccacttcagtggttgtcttagtcactgttctattgctgtgaagagacaccatgatcaaggcaactcttataaaaggaagcttttaattgggggcttgcttacagtttcagagtcccttatcatcatggcagggagcctagcagcaggcagacaggcaaggcactgaagtggtagctgagagctacatcctgatttacaagctggagtcagagggagaaaagaaagaggggaagggagcaagggagggagagagagagacagagagagacagagagacagagagagacagatatatatatatatatatatatatatatatatatatatatatatatatatagagagagagagagagagagagagagagagaaagagagagacagacagacagacagacagacagagaatgagagttttgaaacctcaaatctcagccccagatcacaaatcctacaacaaggccacacctcctaatccttcccagtagtctaccaactggaaaccaagcttacgaacctctgggaccattctcattccaatccccacaaagggcttccaccttgttaattttactatcaacgaaattgacttttgactttgacaattgattttgtatacaaagaaactctagaaaagaaagaaaacgttaagtcataccactaaggatcaggaggcagccctggacagccgccacagcagaaaggctggcccttctatgtttctgtgaatcatagcatatgcgcttgtaagaagtgaaggatatttctccattcaattttatacatgacaaaaaatattcctaccaaatgtgaagtggcaagtatgaatttagtgtttagttctccttaaacagtcaccagaccttgaggtcttcctcaggttaccacagcttgtagcattcattaagcagaatggaggaattttattataaaatgtaactaatgtattatatgttattatcattacaaacccttgtatgtaacccagagagggaatacacactatggatctgctccaactttttaataagtaaattttagttaaagtctatttaaagcaaactcctaagacattaaccagctcccaagagctgactactacatgttatgttagcttgtccatggtgctatttgttactcttacaggatttctctgtgtagccctggctgtcctggaactcactctgtagaccaggctggcctcgaactcagaaattcgcctgcctctgcttcctaagtgctgggattaaaggcgtgcatcaccacgcccagctactatttgttattcttaaatagctaaccacagcataaaattttattttcctaaaatttacatttaaaagccatccaacttaccaaagtgatttcaaaccacaattacattttatctcaactaccagcattttatttagccaggatctacatgagacacatatcatgatgtgctatgtacatcttgttatacagtgttatattgataacaaatgtcatcaatataacattgaattaatcttccataatttatggggaaaaaaggagcagccttactgaagggcaaagttatacaacagctttacagaagctgcatgcgagtgcagtaccgggacacgggcacggacggcggcactataaccattttccgtggtggtaatcttgctttcatctgacacagaaaagagaccgccgttttgaaaactcacagaactagcctcacggttttgtgagtccattgagcgctggctgcgaagaacggtgtttaactcgagaaatcattgaacaagttttagaaaataaagatgcttatgacaatttcaaacttgaaggtctccaaagaaggactgagatattggtgagaggagtaaagagaatcctggtgcatttatttcatgcttccttctgttcgaagatcattttgaggtttataaaaggtggggtgatccaaaaatctccaggctgagagtcctggctgaggctgtgaactgggctgcagagaaagggccacgcctccctcctctgctcgcattactcagcagcttttctgcatgtggctggctgcagacaatctaaacccttccgctgtcgctccccccttatactgttctgccaaaaggaaggcagagaggaaatcagctacggggcaaagactgaatagtgaacacatacagcaatgtccagcgagttacctcctgtgtcttatttatttatttatttatttatttatttatttatttattttctctaccgattcgctaaaatcataaagagaatgcttctgtctgacatcttggaccaaaatgcttcccatactgcactctgtaacttttcaattgaatattaataactaaatggatttataatccattatttccctttggtcacctactcatcacggactaaacgaaagggcaatgccattatcttcctggcccaactcttaacatacgtgtcattgccaaatcaaaggaaaccttaccactgagcaattcacagaacttcgcttagctaatatgcttaaggaatctgagaatgtcctactaaattttaattgaatgaagaccttttagaagaatttcttctgtagataaataaacctagagctaagaaaggaaagctacatctacaggctccatctcaaagctatctatatctgtagtcagttttcagggttcctacatagagaataagtatgtgttgaaaaaatactacactagtaagcagcctttacatcagtggttctcaccctgtaggtggaaatccttttgggattagaatgacagttttacagaggtcacctaagactatgaaaaacatagatacttacactatgattcataatagtagcaaaattacaattattaagtagcaatagaaagaattttagagttgggagtcatcgccacatgaggaactgtgctaaggggttgcagcatttggcaggctgagaaccactgctttatactaccaaaattttggaagaaagggagtgagttcattcatggccaagtacaattgctaaagatggagccaagattaaactgatctaagcaagagaaggaagtatttctgtcttggagtcttagcttctcagtcatggacattccttgatggtatctttccacttagaatatttagggttctgaaccctatttctgaatgcgatttcttgacttttcttggcttcaattccatcacttctgaagtctataaatactagagccctatatagccctctactcctttaaaatactgtcctcaatggtcgcttgcacacagaaaactctacataggccacgtgactcttagcttagttagctgagaaaatcaggaactctttctgagcaacactaaattgggctgagaatgagtcagaaaagtcaaggaaacatgaactcaaagtcatctagagttgaattctgggaagtgaagcttagagcaagcaaaggaccataacaacaaaagagaggcctaaataaatagatagataggtagataggtagatagatagatagatagatagatagatagatagatagatagatagatagatagatagatagatagataaagcaaagcaattgtcgagtcaccaggataaagaataggttcatctgcttatgtggccaaattctcaggggcacttctgcctctgccttagtcgtatttcggctcttggctctctgattgtatgcccactattaatgcaccaattacttatattaagttgaaataagctcttaatataagtcttctgtggcccaaacataatgtgaaaatcattttcatgtcacactttaattactcataattctatctttgtttctttttatttgtgagacacagtcttgctctgtaacctaacggcctgtaatccactttatagtctaacctggtcttttatcaccctgcctcattttcctggtgctgggattacaggcatgagtcacaaagctgggtagattcttcaggggtttttttttttttctttgtattttttaatttattttctggcaatctcactcgtgtccattatgtgtgttgatcattttttatcatcctgttcgcccacacccaatgaacttcttattcctaatacattctttcctagtttcatgtctctttgttggaaggtcacagactgagtgtaattaaagctgtttccatgaacacggcattttgtggaggatggttactggagcatggacaactgacaagtggcttcagcattgaatgaaatacctgctttaccacagtggcacttaagtgcatgctgatggcccccttgggtgagggtggacctcctaccatatgtcattaaatatcatgggctccatcttgtgtaactaaccatagccattgtgacttggctatagcagagtcatatccaggaaacaaggttttcagaactccttttatgttatttctttcctaggagtcgttgctcatagaggccccagtggcaggcccataaaacagtaggagctatagccatcgcctttgcttgctcattagaagtggatgataggaccctgttgctgaagagattgcagtcttcggttacagaaaatagagaaatcgaggcgggactgacctagaagcttcctcccttttgcttagcatttatagtcccagaaagtgcttttgtaagctgctagtgaagaaagtgatcaatggcctaaatcacttgtgaccaacctaccaggacaatgtacctactggtgcaataatcacagggctgattattatgagggtaaccaactggtctttgattgtatctgaagcctgcttcacaagatggattcatgcctatcactgttaagactggtcctaagcctatggccagggaattcataggtactaatgagggagttagaactgttgctttgctaaatgccatgctgtcaaattacttcccaaatacgtttgtttatgcccatagatagtgctgctctcaacctcggctagagaatcttcatcttgtaatgggcaaaggttaatatggtcactcataaataaccatttcttttagagtaaatgactttgagtgctcacccctaaatgaatcatctctaccactttctgagtggctcatggaacatggtagaaggatttctatgtttttactatagagaataataaaaaagttcaacaaaatgaaatattataaatacttgagtgatttgccctatggtataataatttttcaatacttgttttaagtctggaaagtgctcttctactgatttaaattactgttttaagtactgaaactaaataatggcacatacatatggatgacatgtggaaacaatttgcatactgagtaaaaatattaataaaataacataaagtggaaaatcactcatcttttaaaactggggatattgctaaatatagattgtgtgtttaggaagcccagagctgtgggcctgatccttagagccacattataaataaagttaaagtaaaaaaacaaaacctagacattcagtagggagatgttttaaaaccttggtgaccttgtaggtatctttcaaaaattgtatcatcccaattattcatattaagaatattttttaaagtgccacaggtaaaaaatcttttcttaaaaaaagcctttaacataatctctagaatttggatcaacaacattgctgagatattaaagtttcatggtacaaattatgacagaaaagtttgaccaaaaataaagcagccattgttgctacagtttaagtgtaagaatacaatagaatgggtcttggagagtgactgaattttacagttttataatcttttctaatgaagtacacaccttgtaatcattcaataatttgaacagttcataatattgtttaaccaatttagactgcaaagacctcggtctgacagagcaagtcttgacctgcttaacattatgttatgctagtcattttaaaatgagtctttatttcccatagaaggtcagtttttttacattattatataatcttttgacagaataacaaataacattctgaatgtctcatttctaaatacaaaacatcttagtataaaattatgcattgttttaaatgcttggaagtaggtccacatgtagaaaacaaagtacgtatgataaaaaatatcaaaattgtatattcagcaggcatattattagaaattgtaccacccggtgatttattagttactaggaaaactgtagagctaaaccaaaaagtaatcattaaataacaatcaatgagtcaaccaattgttaaagaaccaaatctataggcacatatatattacaaggcatggggtaaacagagatttgcagtgtgctctccttcagttatgaactgtactgcataggctgagggatcaatctatggcatgccatgcctcttcactttccccatcagctgtaaggaagcacaaaggcgaatccgggccagcaaagaataatgcttgagcatttgacatttcaccacttcctgtagcttgcatgcgttttattacactctttgacacaatatttgattttacaagttggatcaagttgtttagtcagcaaaacaggaataagcaaatgagattctacctgcctacaatttccgttcatctccagccgtctgtctgtccaccggaatgaaaactggagcatactcacatcacaaggggcacatgcatcagcgtgaatgaagctaccatacctccctttggtttcctcatctccaaaatggaatctccttttcagtattttatctttactgatttatcataagagctgtatgattcttaccttttttgtttacttagcagagacatcagaatagtagaaggaagatgaacaatgagataatgctgattttgtatacaaagtacaactcttagtaaaaaatgttgttgctttcagtggtataacaatgttattaaagtttttaatccatgtctggcttttttgttgttgtttacttttatctgtctggggagtcttgctatgtgacagacttgtttagatctgactatgtgtccagtctggcactgaactgaacagtgattcccttggtcctcttacctcgaaccctaagtagtcagagtttacatttgaggcaccataccaggatttgcgtttgacttcatacacataactttaacattttaagatggggaaatgcaacaaaatatgttcttttcataagaagagagtttatagctctcctattcctgtcattaaatggaaataatgttttgttgatgatttattaagcaaacacgattgatggttccttcaagtttgtgactggcgtctcaactgtgttattatttgtagtagttcttgaattaaagtgtatcagtctacggatgacattccaatcttccctacctcgatggaccagtttataaatttgaaggctgatctgtttcatgttcctacttttccctgaaagtattcatacctttttacgacataccacttacgcatttgcttttcatttcaacattctgactaatggtacttattaaacagctacagtctggttcaattcctgaagatgttagtacatcgcccctggatctcatagagttgttactaaccaagtagaacctcacagatacgcctgggacagtcctaacacagagaccaatagttatagaaaatcaaactcaggtttgtcacgagggctctaagaatctttattgtaccctccagctttggttcattgctaatacatgctttataggcaaccataactccctaaagaaacatacatagagtggtatccaataaaattaaagtttttcaaagaggtcctttcctcaccaaagcctgtggacagccagtgtgcatggctaccatcagtcgccactgatgattccccttgtctcatggagcattctcccctggtttctgatgaaaaagttgcgaatgggtgagagaccatgcctcttaaaagcataggtagatatatgatagctgatcaatagataagtagatgatatattgatagacaacagccttcctaaagtgtggctaagcactatttattacttctgtcttggtccacatgtttatttactttatctcacaaggaaatgaaattgatccgacaccacctccactcacaagttatcctggcttttactctgtgctgttctggatgactgtcaatgtaaatacatgaggtttgtgttgattttgttttgtttttgtttttttttttctttagaagaaattttaagatattggatgaagatgaaagtcgtaaggctatttaacctcttttctcaaggagaatattccaaattttccttttcctagagttagatattaacttttaaaaattccattaaccatttagatataaatctcaacatcttacattcattttatatatttttaaaaatcggcaaatgaatgacaattacattttgcttgtattttaaaattcttctgtctacttttggcctagaagaaaatgccagcttttagaaatcttttgtatcacatccattaatccctgttaacttgctccctctaaatactagtgtttgtaaaccttttcaggtatctccagatagctggtctaaacaggaatcgtttaaaacctttcatatgtaagattatcatattatcctcaattggaaatacagactgtaaaaactatttaagatatacaaagcccttacattcagttcttgattttaagtagtcttttagagtaccagtagattagaaaatacttattgctaatgaagtgctctgtagaaatatttgtgttcaattcacattatttacattgcttttctctcaactgttttttattataatttatgatgtgaatgatagtgtattcacatgtacatatatgtttattaggggtagggtagagttaccatcaaggtagagaataacatcttttcagttagtgatttagtacttgtaaaacttcgtattcaataaaactgcattaatcactatcattattagtctataagcttatttatatattttactcttgaaaccatttactagcaaactacttttccattatacattttaagaagttgacattttagcagtgctatcatttttttactcataaaataaaaagcaggatgtaataatgtcaaaaattggaatgactgtatgcctaaatgtcactcagcatggataaccattaaattgacacacccatctacctaagaaagtattgaggtgattaaaccaataacatgaaaatattgacactttaaatgtagaacatacggaaaaatgatgttactgagtcaatgcatatttataatgaaggatttcacttaagactgaagagttgcattacactctgcaatatatttgttgatttaaagataaattattaagattaaatataacaatttatgtaattccaaatattttatcattcatagtaaaagatactttttagtatccagaagccattgaattgtagagacatgttttgtttgttaagtccgagcaaaattatttgataacgtaccattttaaatatatattgtgcccatagaaattaggcactgagaaagtaatactcaacgaatgaaatttcagtgatttttttttttagagctatctattttgtaggccatgcagggcttgtatacatggcctggtttaataatattaaaaaaatgaagcagtttgaagaactgcttaccatgttgggttgggatacgtaagagtctatgtgagtgtgtgagtgagcgtatgtgtgtgtgtgtgtatgtatgtgaaacacacaacttctgctttgaagaaagacacggtctattaggagagacacactggacattatttgcgatggttgattttaatgtcaacttgccacaaattcacatcctctgagtgggaagcaccaactgaagaatggtcctggtcaccttaattgatgtggggaaacccaccccgggtgtgggtagcagattctggtagccatctagataaagagagacttagtggaaggaagcttattcacagcttgctgacctttcctcttgctgttgagtttactgaccatctggtttctgcagctgactcctttattgatgatcaggaccagtggtacccaaatacctagcttccaccatcgactaaggtctaggtaccttccagataccttccatgttttggccactatatggagactgctgaggcacccagccttgtggatggagcaactactgcattgccagccttcccagtgtgagacagccactgtggaagtaatgtgattgctaaagtagccttaagaaccaagcaataacaggttctgaggctctctggtgtgagctagttgttatttctattttaatataaactgtataaactgagtaaattatacacacacacacacacacacacacacaggcttttgaaacacagaaatacagatgaggatgtgattaatgattaattcctccaggacactgggagaggaaaatgttgctaagaagcttcctcggtaggcttgaactcaagggcaagacagtatactaggaagcaaaggaaagggctgtgggtataggaggcatgtaaaattaatataatgttttgatatttaggagaaaattgcaaaacaaaatgatgacagtgtttgaaagtgtttgatcagtgccaagcatcactttatgtacttggcaaacatgacttgaggccttaagctgtgatttgcaaatgtagattggaatcaagatctttatagatgaggaagcaaaaatcagaagacaaaataacattatcaacttgatctcatgtgcagccagggctgaactgcaaatgctgatttgccccagtctgggctcctcaaatcgttccttggaatcctattagttggaactttatctctgctcgtggcagggtgcctgggaccatgtttataaatatctgctgaatgaagaataagtgagtcaatcgaaccagaactcactttggttagttaatttcattcgtggtatttatggagagcagaagaaagaattccagagacacgatttgtcaaaactctctaaagaaaatgatgacactatatattgatgaaaatgaatgttcttgttcttgctttatttgattttcttgtccccccactccccatctgctagggtctcattacagcatagttcttgaatatcccaggttgacctgaagttacaatatattcttgatttagatggcagacattgggaatattttgactcttaaaatttaatagctaatctttgaagaaaattaaaatagtgatctccattttgtagacaagaaagacaaggaagagagaattttacaaagagatagcgaacaccatataacgtcatagcataatctagtttgggaagaacggagggccctgaagcaccatggtgtttgccagtaatcactgtattggatgtgtcatgctgaaatgcaatacaattaggctggcataaaagctaacttcacatgaagaaatagagactttgagaaatctcttctgaagaagcttgtctatgtgtagaaggatgagacgttattgagcccagtgggaggctttatcaggaaggggtagatgtcttatatactggagaaaaaaaatgctgtaaaactaatcaaaatcctggaatagagagtggacatgaagactggggtacagggagcccatgaggaagaaggagctgcttcaaaactcaaagacatggtgttctaccttcctacaacgtgtcttcatctgtaaatcagggtttaaatttgataaggcagaaaacagtcacaagactatggtctgcgtccatccaatcagctttaaggttcaattcagccctatatcttttctatatctgatcatttcccttcaaggtattcccacttaaaagcagagtagggtacatattatcaatggatttatgattcttggtcaacagttcaacagaggtttctttctttatctctttgttcttttgtttttttctttgtttctttctgtctttgtctgtctgtcttctcttcctccttccctcttttccttccttccttccttccttccttccttccttccttccttccttccttccttccttccttccccccttcccttcccccttcccttccccttcccttcccccttcccttcccccttcccttcccccttcccttcccccttcccttcccccttcccttcccttcccccttcccccttcctccttcccttcccttcccttcccttcccttcccttcccttcccttcccttcccttcccttcccttcccttcccttccctccctccttccttccttctttctttctcattaaggtttgaaataaattggccacttagtcttgcctctgtagataaggaagcacagtgctgcttgtgtgcaggtaaacaataacaccagcaccctgaaaaagtatttcccaaggaataaaaacaactccaaagactttatctgtgggagagtaattctgatagaaaattagataatttctcagcttatgtgtgatgttttaaaagacctcaagttaagtcctaagagaaacagtttttatcttatgcccaactcacatggaaatgcccttagcaatggtatttatagtatccaaaatgtacaattcacaaatgtatcatcaatagatggtgacggttaaacaagatgacacttagactagagaatgagtggaaaataatgtatgtgacacaagttggataaatctcaaaaacattttaggtagaataatggattatacaataggacataatgaatagttctgttatgaaatgtctagagacagcaaatgttcaggggcagaaggtaaaaatccagattgccttggattgaatggaagtcgatatttggtatttttgatacttgatgtacatgttttaaaatgattgcaatgatgtttttacaactctaattgtatttaaaagcactgaactacaaaaagataataaaatgattcttacatatcttcaaaatttcattcatttctctttttatgaatttaattatattattactggtgtgtgtgtatatgtgtgtgtgtgtgtgttacacatatgtgtgaactatggtgcactcatgccatgatgtatgtttgtaaaaggcagaggacaactttcagagatggcctctcagatccttgcagtataggttccattgacttcactcaaggtgttaggattgcatagcagtggttgctcagccatccttctggtattctttcttgttttagaattgtaatgtcttaattatttttctactcagttacattagttaacagcaaataagagaatgaatgatgaggaaattatttattactatgccaaacttcctgtttcacttggagccccaatattatgaatactattacagtggcctaaagagtgttattggttcagtgtcttaactgatttgttaaaatgactactttaaatgtgaatcatagatataatgctaaatataattttagaagaggcctctataatatgacatataagacagtcaactgttcttttgactaggagtcctcaacttcaaatcgcacaagctaagaaagtgcagaagatgaggattccagtgagctgacggggtggttcaatactttttccaaggatttacactctgtggttccatcagcaccaatgttagctgaccaggatggctgcggctcaagagtgtgacatctagagaggctgcagcagtaataaggaagacctttatttccccttgtggcgtttgcccaggtgagaagtgttcttccagaagcctgactgcagattgccctcatatttcattaatgaggtcaggagcccaacacttattcaatccctggcaagagcaatgaactcgcaaacaagccctcccctggaatttttatgaaattaaccaatttcctaggtcttctggatatataacccagaggggagagccatacagaattacagtcctactttagacagatgctatctattctattactaatgtaggaaagaaaggcaaggtcacttaaatgtccctgaactcaccactaatcaaggtcatacagatgaacttgaacatagcattattttttaaaagccatgaaatttaagattatctctaacttagagttacatattataattatatttaataaaatatatatcattgacggtggatataaaggactaccgtttcatttaaactaataattatagtaatttttaatattacagagttgccagctctaaatgggatgtgtccttggagctcagagaaccctttggaagaggaggtagaaagggtgtaagagtcaggaatggagatcagcaggagaacacagctctgtgaatcaactcagcaaagctcatacaaactcatagagactgaagcagcaagcacagggtgtgcatgggtgtataccaggtcctctgtgtgtatatatatgtgtgtgtgtgtattatatatatgtgtatatatgatatatatgtgtgtgtaatatatactatatatacacatatatatcacagctttcagtttagtatttctatgggactcctgcgtgtgaatgagtggacctctgattcttaaacctactcttgtggctttttatcttctgtttgtttgccttgtccagttttgacgtgatgatttttatttcatcatattgtatgttttattttgttatgccttagaagcctgttcttttctaatgacaggcagaaacggaatggatccagattgaagtggagaggaactgggatgcggaaagaaagaatctgtttataataaaagagaaaatactacgttagtctgctttaatatacaatgtggttcttagatcgcaagaaaaatattaatggcacttttgccttaggggagagcaaactttcaacaatacatatttgaagaataaataacaatttgggaaacgctttactatccctcttctgaatctaatattatgcaatatgttatgaaagagaaattctaatggatattttaaatcccttaaaaatgttcagctgaagagtccagtgttagttgctgctagaaaaaaagttaaaaacatgagaaatcaattagacactgtaattctacaggttattactgatgatgtaaaaatcattttgtctctcttcttgaaagttgaaaaggtgaagtagtttaatgaactataacatatgttttggataaatggtggcagagtgaaagaaagtgtcaggcaagtcctatgtgtgcttttcagccaaggagaaccaagcacaagagaggggtggagaatggtcttaaccccagtctacgcccaagcccttctcgttttatcttgtagatgctaaaaagatgttgttggagttccgttgtctcagcaaaagcacagatttggagttgtatttcatatttctttaaaaaatatttatgaatgtagtgttctgcctgaatgtatacctgcaggccagaaggcacatcagatctcattatagacagttgtgagccaccatgtggttgctgggaattgagggaattgaactcctgatctctggaagagcagtcactgcttttaatcaccaagccttctatccagcccatgtttgatatttttaaagtaattgacattttaaactttctctcaaaagtcatgatctgacaaattttccatgacgataggagtgattttataaatttaaaactattagtaaaaatgttttaacattatattattttttctgatggcactaaaaatatttgaatatatggcacatggcatatattgaaaacatcataaaatcctattacacaaaaggaataatgtagagtaaaatactaaatattaagcaatacccatgattaatatggagaataagaaattatgagatcatgaatattattttcttctttatgcatttacaaatgctctgtttttataatagcattataagtagtaaatttataactatgaaaataattgggttattaagagttggctccaagccaacatcaatggatgtctgaaaaatgtaaaagaagaaattaaaattttgagatagtgaattaagtcataagagctgcagattgtcacttgagaaaaatgtcagaataaattagaagaaagatatactgatgggagtgtatctgagtgatataatcagaatctgtgtgaaataatataaaattattatatgcttttcaggtatattttatataatggtatttataaaacatccttaaattatagatttagtaaatatgtaagaataatgtaaaacttcttattttggtttcatttaacttacttctgttgggcaattactgaacatacaaagttgaaacagacagtggtgacagtaccttgtcacacacaagatactaactacatcacactgcaaagaaggtatggagggaaagacaagcagacaccacacagtgcatacagttggtgctgtgatggaagtccacactgggcctaggcacatctcagaaggaaagtgactcctactgaggggaaggagaggtcatgatgtcacagagaatgaacaagtttcgaaggcttggaagcagcttcaataactcacagacacatttacttctacaggatagataggccacagggtaagaggtaaacctagacagctcatggaagccagtcatcttgcattggatttttaaaccctgacgccacatttaaataatggaagatttttgttgctgttgctgttgttgccattggtggtgtttgctttgagatagcatatcactttttagcccaggatggcctcaaaattcatagtgatcttcttgctgaaggtgttctagcaggctctggcatggcaaacagtacacacaggtttgcactttcacatcttttcttctccctttccccaaggtctattccctcatttggctactgattcattcctgagatgaaacaccgagggccaactataagaattaattatttggctaatatgtccagtcaggatttactaattcactccagcacatatttccccctttcccctttaaaagctcaatcatgaagaagcatccccttgcttcttttgccccttgctctctgatttcttttgctttcttacttgctgctatgttgccttagcagcagcttgaccatctcccttcccccgcagccccacattgcccccacctgctcctcctagttaataattcggtgtactgagaatttggtttaagagtgccgacctccctttcagtgatgctatgacttggatcaggactcgtttctaggacccccgatccagttctcctaatggccattcatttcatctcacagcagcttattggtgaggtttctcttactacccatcctaaaccttccccgaatcatcggatgattactgttgaatgtctagcatccctgctctgtcttgcgcaggtggggagaatgcatctccccacataccccagccttcagtggccaaggtggacttccttggatggtcttcaggcacatcccatttcattcagcttggtttggatggcagttgtctttttcacttttggttgctatccgtttctaaccatctgaaaattctatcgacaagctccagatttctcctcagtccactgtgccttccccttggtgatggagcttgggtgacgacccctcctcactgaggctcttatgagccaggagatatcttcagctctccactctggctcaaggccaccactagcaaaggaaactgactctctctgtactgactgaaaactccagcacacacctaaagttactgatgcatcccaccactcaaagaacggcccttctattccctataagaataaacaaaatgacaatatttacagagttggagtattccaggcatgtcccatcacactaggctcgacagcctaagtaaaatgtgcatgttagcgctgatgggaacatagaggtcagctgctcactgagaaacaggagaaaggagatgagttagatcaatagaaaatgcttacattcattccagtaaggaatgataaaagtttaaatgaacattcacaatttgctgacttacttcacaacacgtttactaaagcttagcaaagtgataatatgcacagatccttttattgtagcaggaaactttaaaactaatataatgcgataaatattttatccgtgtagcataaattaaagggactcaattgcctgcatcttaatctcgattagtgcctgttaatagcaaaacacacacaattaattgtactttaaaagcagatcagttatcaaactcagccttagaataaaaattttgatcttcaaatttgtttatgtagttaatatcattattgttagttttggtgccagggatataacccaggggtacacagtatgtgctaagcaatggcttagcccctagcatgtacatttttactatggttgaggaaccattaaagctttagcatcaatgaattaaatgcattgctattagaaattagagaaatcttaaagcattaaatatcaaaattgtgtgaacatcaatcataaacaaatgctaactaagttactttttaatggaaaatgaccatgtttctagagaaaaggacttacgtggcatgggtttttataattttataaattttcaaatatctaacctaatatctagattcttttacatttaacagattttaatttatatttagatggagaatatgaaaaacagttggtcttgcagaaaggtgtgtggaaacctgaaatagcgatttcatgtaagtataaatatttctccttcctggtaggccacattagataaataggtcagagtcatatccgcaaacccactgtactctgacctatgcaattcattggcttattgtgcacagttaggtgatttactatccacaaagatatatgtcataagcatggcccatttatagattgttagctgactgtgctatataaagtttaaatttttacagcctctcctcattagtctgtcaacatcactgctagtcacatctggaaatccttcatatttaaaatgctgctcaattcctggtggcagaaaagtgttccagtattctaatggtcatttttgtcacgggcaatacatatttacaattactttttactccttgacatggctcgatcacttctctcatttttgaaaatgacttaaaatgtaagctggaatggtctgcacctgtctacctgctacattttccaaggcgtgatagtgttcaatggaaatggaatcagtccagctggtaactcacacagctgtgcaggtgtgttttggggatgatattggggcaccaaacaaacaaaaaaacgaacaaacaagatgagccctggggctccagatgaaatagttttgcagcatcatcaaacagactcctttaagggaattggattttcattttatagattattatttttcctaggagcaaatggctgtgaaaaatttaacaattcttcataccactgccttactaaggattaacattgagaaatataaattgtttttgtaaatataaataaccatcaacagtgaaaggaaggaagagtgcttttatatgactataaagacagttgggatatgatggatgcctaaacgttttcaaggaaatgcaccaaagttatggggtaagataaaaaataactgcaaaagttatttttaagactgttctagtcttgatggggtggacacatttttgagagcatcaaagactaaacactgagttgataacatgactgaatgttttttgttttttgttttttgtttttgtttttgttttaaataaatgtcacaatatggcgacaagattaaaagtgaagagtatgcgagagtagagagtcaacaaagtcatagtgacaaaggagaggtggctaattggtgagcaggtaaggtttctctctggaggagaagctgctggagtttgtcactttgttactctacagtgttgcctggagttcgatacttcattactctatagtggggtgaagaagttcaccttcttattttcatttccttccctcaatgatttcttcagagctagctcttaccagctagaaattcttcaaacgacactcgtgccttccttcacacaggttgaactatttgtctctaatgccctaaagtactggtgttcaatcttccaggcacttccaatgatctgaaatctgacctgcttaggtcagctggctctgagattatggtattctagtcctcaaaccaacctgttggctcgttggttttgtaccaaacacactgacttacatagctcaaaataccactggccttttaaaaatggcatatcacattccaggggaggatcaaaactgctggctggtgatatttgtcaagtctctcaaagttgcactttccaggattttcaattcactgaattcttagacagacatgtttatgtgaaagaattctttatatattttttctcctctttgagtgggcaaatgaaaatcttgacctctgggttccttattttatttgactctctgtagtatttaaatcttaaaattttccttaaaataatctaagtatggatattaatccatgatattaacgatcgatccttgtttacagggtgcctttccctgctcctaccaggcgatttcatattttcaaggatcagttcttgaaagaggatgtagccctcgctctgccaatggctctggctcagcctcatgcatctgcctttgctatagtctcaccggaacattgacatagattgattttgccaatgtgatcagttgagttctacacagtttaaaaatgtcatgttctggcttagtgtttagtggtgttctttgttcatttatcgtttactatctttagtttttttagtgtatactcattttttcccctactaaaacccatagccaataatagacattccataagtacaagtaaatttcctgaaaattttctgaagtctgactggagacattaggttacaaaattacacaatttcaagtttcttatatcaaatctaatcttgtatcacatttctttccaaaatttccatttttacaattttgctaaaacagcaaattaatatattaaatatggactaatttaattaatattctaggtgataaaatattaaaatatttggctattttctcatttatctcctggtcactattttgattatgtaatgcttatccttataaattgatttgccaagttccatttgataaataatgtgttctaacatctatatttaattttttaatgttaaggattaagtttggggtctcacacatactggacaagtgctctaccattgaacctattttaacttttaaaacagtgtgttcttatttcaaaaatattttctgccattacaaactaaagaatttagaaacaaatcaataaaatgggaaaaactgcacaactaaattgttagtactaatgcttattgtgcaatgttttaaagttatgttatttccttatggtttttattttagatctacataatgaacattctctactttattaaaaggagaaaaataattctgactttaaacaaattataacaagaaaatagaaattataattgcatatagcagactctaccaattctaacactagttttattcattttttttttaggggaaacaaacatttgtatctttttgggatttgtgctattgtatcctcagcaactttgtacagaattaaatgttatttgatatgttacattcaatggccctgtaatatctttttgtttacatagattatgatttaacatagtatatgtaaactgttttaagtttcatcgggttgcaatgttttttcctacataggaatcttttggtagaagtgacagttgaaggtccagattattattaattaaaatgattggatggatagtccaaacttatcagccagacgctgatttgttagaactgtaattccaaatctgtaccacaaacagcaagagagaacagttagctggtttgttttaggagattacagcatcggaagtccaaccttgggccaactacttttactgcttgcttcattcctgccattttctggtgcaaatgttgggctctaggctgcaacattttcccaagacattgcactttgtttaaatgagcctgacccagtttctattgcttatagaaacactttggaattgatcgttttatttataaaattgtccataagctcctaagttttgcatccatcttggttcctcttgtaattaaaatgagtaaaagccttaatgcttagcacagatggtggctctaaatatgcattcacttctccacatcatgttatttatgctgcttctttaaatataatggtaattagctaattacaacattagcatatcaacatatgcccacactactccttattgtgggagaagggtatggatgacgaaaatccatccttaatacaattttaatcatgtcatcagcaacaaaaaaagactgaattgatattcagtcttccttgtgtattttagtcatcataagcaagccaaaggcaaccatcacaagatgaatcgtgttcacctctaggttcatttgcctaaagccaaacttccctactccatatctgtgtgtatttggaggcaaggcctttaaaatagttggatcacacggttagacacaatctaacttttctccatctaagtggaaatttaggcatcaaagcaagcactgtgaattcaggatcacagaagaaacaaacatgtcagagcacagagcatgaaaccagcaagccaagcagagaagcatcacaaggaaccatacctgtcaatatctcaaagcctgatctcatgcaaactatattcctatagtttaaaccacccagcattcagtgtagtgttacataggcccaaagcatctaaaataaaaccaactctatttgagaagtataattacaagtacaacagaacccctaatggcatttgagagacaaaggtgactaagcagcgtctaatgaagggcatgagcatcacttacatgtgtgcagcagaggacgtgcaatgcaggagggacccttctgggaaataactagccatctcctctcaggaagattaggttcattaaaatgctgtacctaattatcacttttgctttctgggagtatcataaacaaatgctttcccaaggagaaggaaaaatttatggtacacttgaacccaaaggttgcaatgggagaatatgggtcatttaaaaaaacccaacagatttaaatctatgtaaggttttccaagaaggtacttttttggtggcatttcctttaaaaggtgtcttgtatatctagtgtaaaataaatgatagtaatagcacaaatgaatcaccggccgtgttgctaagaaagttcaacttggatagagaatgcagtcttttcaagaaagagttctggactaagtagatgcttacaagtcaaagcaaggagcatgagccataagccgaattgcatacaagaaactgactcaaatgaaccagagacataaacaaaagagccagctacaaaaacatactgcaaacaaaacagaatcaatgtccagttttgcatagagttaggcctatatggtactaaagaaggacaggtgatattaaaaaaaaacaacaacaaaaaacagaaacaaacaaacaaacagaaagtccgtagatactgcattaaagctagaggcctgttatcatgggagtaccagaggagctgaacaagagttttttttattgctcataggagaaaacttgaaaccaggatctattgtaagttgaaatccacatctcttagaaaattctagggtctgatctgagaacaaggagaaaacaggtagttgtgaagtctaaaatgattcttatttacgttatactcccttataatgtggattctgagtaaacaaagcagtaatttcaagctgagctctggttttccaatagcacactcatttacttgcaaaacatgacttgattgaacaccactggccagctgttgtgtgccaactgcaggggcagataagctccggtctacatgtttcttcttgtatgtatagtctgtatcattctcaccaataacctcacccagaatctttcatcaaattgtgcatatgtgtgtgcacctgtgttgggtgcatgagtgtgtgtgtgtgcatgtgtgtgtgtgtgtatgtgcatgtggtatgcatgagtctgtatgtgtgtgcatgtgtgcacctgtgtgagtgcacaagtatgtgcacatgtatgggtatgtctgtatgtgcatgtgtatgtgtgtgcatgtgtgtgtgtgtgtgtgtgtgtgagtgtgtgtgtatatgtgtgtgtgcgttgtaacatttttctagccaacatcactgcattctaggaatgacagcatttttcctcagagacttaacaagttgttaaaaaaaaaaaagctccttgtaaatatgaacagattacttttctaaacctagaaacttgccaatataaaatacaaggcttaaatttattcaaccaatttccctcatgctttttaatagaaaccactttaagagtctgagtccagccaccaggaacccacagatgtggggatgggggtgtctgttagtcccagctctttcttacctctgcatagacccacccatacagagggtccttttctcacatcacctcaggtcccaggtcccaggacctctgtgcggtttctgttcccagtttttcaatcattgttcctttcttatacgcaagggtctccatccctctactcatttagatgtctcaactacaaggtcacatttctacctcctttttctcttcaagcccctctctcctatcatctctttatgcggtgttctttttctttaagggcctttgatagtcctttgtgcatttttttctaactttattactagactgaaggcaacatatgggcatgaatttccttgtaatttccatctttcaacaccttcggacaccaactagagggctttgtaaaaaaaaaaatttaacttggatgtcactttttgacatcttggcatgaaaggatagagaggagttatgctggcaagggctgatttccttttcggagtcagggctaaccagtggttctaccaccacacagacatgagtgttctagaatacagaagctatggcaaggctgcctgagttcaagtttgtgctctgccacttatctgtgtaacatttggcaaggcaatctagtctcatagccttcatttcttcccttgtcaaattatcaatattacatagttcttacattcctgaagtactgcttagcaaagtaagtactacctctctataataagttgacctctaggtacgtagataaaagagaagagttacaagcacaagtggagccactttgtagatcatctggatttttcagacacgtgtgcaccaagagtaagtctctttctacagcctaccctaagccagagaaacacaaacggagctgtaaattccgcttaattgacatttcagaatttcaaagggaagtaattgcgtccctgagcttctctgcactgatccagagtgggacacatctcagcccatggattgctgtggttctctttctttccctgcactctttctccccctcccactcttccaagtcagatcaggccttcttgctgaaggggaatggaaaggagtacctggcggatttcatcttcttcacctaacctggagggagaggacaacttggatagaacttggcatgcctggttttactgccgtggcccccgaggactacccagatctccgctgtccacagagaatggaaattaaattcaggctaactttcatcatcaggaacactcagataatgtgttctgatcatcatgtgcctgtgtgtgtgtcaattttgagcaactctccacgagagaaggcttctcagtggaatggagtcctgagtttctggtccttgggttgtgtccttctgtctgtccacttgctcctgatctttttggatgggaaggcagattgtttgctcttctccccagtgccttcttggatactgtataattaattaggcctccaatcatgccttcccagcctccacggatggagaaaccctctccgccatgccttaaagaggaattgctgtaataaatgagtctcctgatagcaaatttctcagcaagggggaatcgcgtaaatggagacatagtattgacagcaaagtccaatgtgttatttttaccagaacgaactctccggttcaagcctttgaaagagacatttgaaaaccaaaaacaaacaatgtaatggagcgaggaaaaaagccacagaagtgagtggcagggagtttaaaagagcagatgccactgccaggtctatgggacataaccagccacttgtgctgggtcttggcagtttataatgctacctcatcttctccgcgaaattgttttcccgtaaatctctgtggccatccattcctgtctacacattatgttcctaaaatagacaccatctaaaaatcacttcaaggagctttgtggaggaaggcctaaattgcaacactcctccagcgaagatagatgcagtgtttgatggcattaccagtcggtagccaggaaggggagtttgtgaggagtttttccaccacagttaatctgtttctggaaggaaagggaagtgtcagacttcccgaggaggcaaacgtgtgtggaagctctcatttgcatcacccccggcctgtcaggtattgcagcaaaagggagaggtgagctaccctggctctccttgggcaggagggacagaatcaggaagcatcaacctcagcatggaattttcctattcctgtttggcatcctcctcttgggatgatttacagcgcgggttggagaaacacgctctgccactccactagcgcaccagatagacagtgcagacctgcagatccatacccgaggagaagccacatttcctacgtgtgatagcaacagcgtttggcaatttgcgactttgctactgcagcttagaaaatatttagtcacatgcacatctgaacagaaagacacccaggcttgactcagtcatttccgtcagacacacgaaagaaaaagcgtctctgctcacaagcttatttggactgctttgttgaaaggaggggcggcagacactttgtagatgtggcaagagggctttatatccagacctcaaacaggtaggagagaaggaagccaggagaggtaaggaaggggcgtggaaaagcctcacagccacctcgaagaaaacagtttttttgccctgttcagaaagcaagaggttccacagtggttttgtgtcaatggagcacatctgcagtatcattgccgttggtgacctctgtctaattaaaagtaagtcagtccttcccacccggcattgtctgaaacccgggactctttatcactttgctaaagttcatttgcaagtgtagttaaggaagagtcaggggggaaacagcatctgtcccttctggtcctggggaggaggcactcctttccaagagtcaagcctctgcccaaagaagctgcctcccctgcaatgctaggatccaggagcagccccgctgccttcttgcttcctctgtgaggtctaatttttgcatcatctttaggagcgatatgacctctattcacagccatcgaatccagttccaaagcaccaatgacagagggggcttcaagacaagaccttgcctaggaggatgcaggcaagcaaaggcaagagctggcccgatgccaagttattttaggccaaagaatctcatccttctatcaaaatgctgaactgcaaaacgaacctgatttcagttcatggaaggttgagaggaggaggagggggaggggaggaggaggaagagaggaggaggggaggaggagggaggaggaggaggggaggaggagggggacagttggtccgaattcacatgcaaaaatagacttcctgttctgccccaactcttatttccgtgggctcttctccccaaggatttaccaggtaagaattcaccaccaaagaagatcacaatgagataatcagatggcttacctgataaaaaggaaaattatccatctgcagtgaggagcaacatctccccacgacgagtccgcaccttccgttgcaacgattcagattccttcttgcaaaaggtgaccaagtgcttcacaagggctgcagcctcataggggcagaacacacgtacacaaacacacgcacacacacacacacatgcaccagagacctctgcagtatcctctcggcttcatcctcgcctcactctatggtacctaatacaaatcagcaaatagcttgttttaaaaaaaaaagaaagaaaaaaaagcggagacagcacctaacgttacagtgccatctagtggctacatcgtaaataggttctcacagcctggatttctgtgttctttctcaaccgcttccttctggttcctttttcttttttcctctttattttggttttattacttcctcagatgcctttttttcattcccctttgctctgcctatcatggaactattgacttaaagattaaaacaatcagaactggagagcgttgcttttaagttaaaaaaaaaaaggtgctaattttgtttgtaaatgttactttattttctctattaaaaaaaaaaactcattgttacttttacagattacggaacccatgaatgaaatttgcttatttctactgtctggagaaaagtgagtagtcttttactacgtagtcgtgactttacatgaggaattttgtggattctttcttctctaacaccgtgttcacggtgcttttcatactatagtgagtggctctgaaggaggcagatgcgagtttaattttaaactcagtatcgatgagtgtgttttgaagattatatccccctatctttagtattgatgttaaataggattatttttatacccatttccatggtttcaccatcttttattgtaatatatctatttgtctcccagatatgactagccattgaattgtcacactatgttttagagaacaaacgtaagtattaaatattattggtgtccactaggtcttcccaaaacaatgaggagcccatactgaagtctggggagctacaggaactgaactttctaagccatatattataatttaaagcatcattagtctttcacatttggtcatacataaacttatttaccctgggtgtgtttctcttgtcacttagcacacttaatgctgatgaaagtcaccatacatgctttgctattaaaaaaaaaaaaaaaaccaatatcccttagactttaatttgtctattccatactacaggacagggaggcatatactgttaatattcctctagcaattctcattgtatgttgagaataatgagacattctgaaccttattgagacttttctagaccacatagtttgtgaagcaaaacaaaccaaccaaccaacaaataaataataagaataaggataaggcccaccctttcagaattcattattttttggaaaatagtaaatattttacctctttccattctagaatcctggagatgtaattttcattgtttctttataaagaaattttacaagtccttgtttatgggttcatgggtccatctcctgggcccctttcttagtttctgaaaggaagcaattgaccaaaattgagctggaagtatatagctcatttggtagaacacttagtagacatgcaccaaaaaaccaaaacaaaacaaaacaaaaaacaaaaaaacccaaaaccaaaaacaaacaaacacacacacacacacacacacacacacagattttcagccttgtagactgcttgtacaataaaaacttcagaacttggaatgctgaggtagactgatcacaaatatgagttcaaagttattatggggttagaaattccatgccaacctcagcctcagacatagtcacaggctcagcctcagcaactaccacagccatggtcacagtcagagccacagccacaaacacaaccacagtcacaggcacagcttcagacacagacacagagagagccacagtcagggcctcagccacagcattagccacaacctcagccacagccacagctacaggtagagcctcaggcacagacagacacaaacacacaaagacgcagccatagctgtcaaagtcacaatcacagtctcagcctcagacacagactcagccacagcttcagacacagacatagtcataaacacagagaaagtcacagtcatggacacagctacaaccacatcctcagcttcagccacagccatagctatagctacagcctcagacacagacacagacagacacagacagacacatacacagacacagccatagctgtggcctcagaaacagactcagacacagccacaaccactgccacagccattgtcacagccactgccacagccactgccacagccactgccacaaacactgctatagccacagccactgcaataggcactgccacagccactgctatagccacagccactgcaataggcactgccacagccatagccactgctacagccacagccactgctacagccacagccactgctacagccacagccactgctacagccactgccacagccactgctacagccactgccacagccactgccacaaccactgctatagccacagccactgcaataggcactgccacagccacagccactgctacagccacagccactaccacagccactgccatagctgcagccactgctatagccactgccacaaccactgccacagccactgctacagccactgccacagccacagccacagccactgccacagccactgctacagccacagccactgctacagccactgccatagccacagccactgctataggcactgccacagccacagccactgctacaggcactgccacagccacttccactgccacagccacagtcaaagtcacaaacacagacatggccacagtctgagcttcagtccgcactacataatgagaagctgtcttcttaaaaaattaagttaacttcctgttccatctccaaaatgcacaataatttgtagctcttcactgtctgaaaaaagtgttgctccttctctggttcaggctgagtaacactggaagaagctggagtgaccaacacttggtaactagttactagaaagtttgaaatgaaaaggcagaagggaacatttgaactaagaagtagttttatatttatattatgattctaagaccatatactccatatgaacagtacttaggatttaaatatatgcacataaaaataagaacatccaaaagacatactttactacttactaatagcatattccagaagtcaatgttgtgcattttttcttaataataatatcaacatctctccttccttattgccagagtgcacttggtcccttgtctatagaggaccaggagggcgtgggtggtgtgttcccagctgaaccagtctaaagaactatgacatgactgccatctatggaactaaccttctcttttctctcaccatagcattagaagcaggtagggcaggcaggatgcctacaggaaatgtcacagctaatgaagaatgagggaaccatccaaagccagtgcactccctgggttcctaatgatatcacaggtacaaggcagaatctcagaagatctggaacgtccctgatttgagtatacaagacagcccctaaaaagtctctggaccaatctcttttgatatccccgtgtactcaaaaccagttgatttatggagagaggagtttaagccctgaagatatcaaatattggttatatcatgggtgtccaactctgaatttactcacttcaaaagtacctgctaataaaggcattttcccaggcttaattaacaccattaagccaagcaaatgaactcttactttgagaagtttccatctcacaatgagagtcagtgagaaagggagagtattttcaatgcatgcacccctcttccttcggtttgcctgtttctttcatgacttctgcatcttaacaaacatccagccatctgcacaaggcaaagtggaccagtgtctaggtcaaacatctttttctctaatgctttccctgtgttttcagtgaataggctccttttgttaattgtaaaataaatttatgttttcttttatggaatatggtcacggattatattgaaaatgttaatcgtgagagaataaatgtttctttgcagactgtttctgaagaaggttaacattccattcactgtacaagagtgctttttaatgaataaaaaatattcattaaatatagcttgtcatttagtagcagacacgtgattcatcagagtggtaacaacaccaactgctttaatttttcttcatctaagacctgccatgaaggaaaagacaagatttttaaaaattagacccttaaaactatgtatttaaattttaaatgttcactttttaaacataaaaatgtaaactaaaaagaaccgtaaaactttatgctgctctcacccttgtgtttgctggcctctctggacttttgctaaaggtctcccatttctatctgtctaccttctaataatgaactgcagttgggctggcatattatatcccatataccttttgtggtatcttagttaatgaagaaaagtttttatttttcacttttccctggcttatttccatcaacaaagactgaaggggccatttccttatttctgggagaccccatgtgatctcatctcagaaaagagaagaatgttatttcttggctgtctctacttccctagatggtgggtgcaggaacttgacaggtaagctgtgggctgtgcctcttctgtaagcggttccaacaagagaagaaaatgagaacacaaaatgtcttgtcattgcttttgccactctgtctctgtcaggaggacacagccatctctttgccattactctgtggggcatgggctctgcacagacaggatggtctccagttgagctgaggtctgaaccccgtttgtgataattcacctaaatggcacggtaggcgttccctcatgctcctggaactctggctcctgcctaagttactgccccccacaacccccacaagagaagcatggtcagtagtcacgtaggcaatggcccaagcttctgaccttcaagctaaactcctcccctgttacctagcaatagtgaggaccataaaaagggctgtttagcccctgcttgctctcttacctcttacttctcactctcttacccctcactctcaccccctctctcctctctctttgtcttctcttctctttcctttctctttgccttctcctctcctctcctctcctctcctctcctctcctctcctctcctctcctctcctctcctctcctctcctctctccctcttactctctttctctctagccttctctctctctcccttctctctttctccctgcctttctataataaagctttaaaaccatagagagtctctgctcatcaagatccgcttcatgcactctcacaggtgttgggaacctcttccctcgtcccgctcttctataaccctggtggctttagcaaggtagctcctggatccccaggtagggctgccccttggccacccgctgaagagtgggtcagaggcttgaatgcccacccagggatgagtggaaagtgtatggcagctctcccatgcctgacagaccagagaataggtaaaactctggcggggtgtgagtcccccccttccctagggaccccctttttagttcccaacattactccatcacttgctggaaagcattagctgcttagtggccaaagaagggagattacaagagatgttacctctgttggtagaatgtgggtattaaagaataaatgtgggattcaagtggaaaagatagcctaggttctttctacctatcagttttaagataagcaagaggatctcttgtgattagcatcttgaatgattcaaatgttctcaagaccagaaggcattaaaattccacagtgaaattcgtaaaatctcctaacatggaaaaaatatcctttgttaatttcaattttagaatgttaattgtcatgcattgtgacaaccactgcttgaatatattttttgataatcattaaggaattgtggaactggaaagttttctcagaccatccagaagacgattattattttggataacagaaatgtgacatccagagagatagtatgtcttgttcaaggctatacagacagtttggaattgtaaaagttcattcaaactttcttccccgtttaactatgaagaaaatgaatattgagcaatgacatcggcacacaagaagtgaaatggaagtgaggggagggtttctggatataccacgattgattttccctaatgatttgactaatatgaatgaaataggaggatataatagaagctgtctgtttaaaaaggtgatggaccaggagggacttccagtggagggaggggaacaccaacctattcacaaaacctttggccccaaatttgtcctacctataatatgtgcagggataatatatggggcagagattcaggtacaagttaaccaatgacttccccaactttagaagacccccgcccccatgggagatctaaatcctgacactcttagtgatattctgctatgcttgcaaacaagacactagcataactgtccagcagccagtggaaacagatacagagtcccacagccaaacattaggcagaactctgggagacttggggaaggatcgaaagagtcagaggggtcaagaacaccacaagaagctctacagaggcaactaacttgagcccatggggctcacagagactaaaccaccaaccaaagagcatgcagaggctggatatggaccccttagacatttgtagcagatgtacagcttggtcttcatgtgggcctcttaaaaatttgactgggggttgtctctgcctctgttacctgcttttgatgccattcccctagctgggctgccttgtctggcctcaatgggagagaatacatttcgacctgctatgatttgatatgccaggtagattggtacccatgggggttctctgaggagaaggtgaggtggcactgagggagcagtatgtgagggcaggcctagcagtatgtgagggcaggcctagggagagaggaggtagaagggttacatcaggatgtaaagtaaattaaaagaaaaggtgaaaggctaaaccaatattgggttaagcactgatcaccctcatgtatagctttgcagacagttcttaaaaattgaccacaaacttctcaaactcaaggacatgagagtacaacactcatgactttcattcatgtccaaggagagacctggaagaaaattgtcccaaggttctaaaatttcattacaatctgaagtaaaatctgaaaacacattttatgtttccttagttaataaatcatagcctcgaaggaaaacaaagaaaccttttctttctttctttctttctttctttctttctttctttctttctttctttctttctttctttctagataaagtcatgatcttgtcttgtgtaccttcaaagacccagacctaaatggtccttctgtcttgcctttcaaatagtcaggactgatggcatgtaataagtaataagggctggaaagtaaagtagtatgctgctcatgcctacattgtatacctcactggcaaacagatcaaggactaggccttagccttggaggcaagatctaggcatattacagtatttcaattaatttgtctggatctactcttacagggggatgaagagagaatgaaactataacaagaaacaaagaaggtacatggaaagtcataaaggatttggtaactatgctggattctcttctgtgctcatacatactggcttttatgtcaggaagtcattgaaatatattgcctgggttcctccctcatccctttcactcaacaatcctcctcctttgcagaggtaagccaactaaaactgtgacaaaaatatcatcaattacttattggatttcaaagagcaattttccatttgactatattttgaagtcaatcacagcacttgcctatatatgcaagagatctagcacactttaagtttacagattatttttgatattaaaggaaattgctgatatttatgaagacaactcacttttataaaataaaactgaactttgccatgacttaggataagccaataatgtgtaggcaaatatgtaattcctattcccctgaaggcttattggtgacatctttttcttttcctgtttaaaaggaaaaaaatctactgaccttcctaggaacctctcacagtcctcacactgtgtgtgggtgtcattacagccaagtgccatcttatttcacatggcttagtgatcattgctgaagaagtggaggaaagagtgtgagagacagaggaacagcaagctttctgtgagactgggtctcctagaaatgccagagagattacacccatagagtctcatcaacatggctgcctaaataagacctgaacaatgacaacaccaatggccatactaacatgcaactggggaagataaggaggttcacactagaggaagaactatggacaatagggaaatgataagaactggagaaatggttttccctgaggaagaactccccaattgttatctgctataaagtggtcagccctggcataagatgcatacaggtaacactatatggactgaccaggtttacaatatcacagtgaatgctatgtgtttcatatatacaagctatctatctatctatctatctatctatctatctatctatctatctatctacaattaaataacaaagatgccatgaatttggatgaaagcaaagagggttacatgggaagagttggggagagagaaagggggtcatgttctaattgtaacttagaaaacaattttaattactataaaaagcattcataggtttagcataattcatagaaacaagctctctatgataaatgattctacttaacaccttgatacttggtaccatcctgtggtaagataggttctcagaaaaaaatgtattgatacttaaatatttatttctctttccaggtcaaaatttgatagtgatttcaaatatatggaaattattgctaaaacttagtataggctgagtatttgaacactcacaggaaattcatgacattgatatttttgccatcattttataggttagaataccaaaaaccaaaactatttatcatttttgccaaggagataaaatgtagcttggaaaatagcagcctatcttcaaagtcgggtccttgttttatagaaatctctttctagcaccacattattattatgctattgtcaagtctctgggatccaaggggaaaataggagatggtgcagctcttcttcactggtctgggaaagatcacaatgtgcttacatagacaccatggatgaaacatatttctaaatgtacccaaggaaagggggttttgaggtacaaggcaggctggcagccacagttccaacaaatgtggtattgggtatgtggccaagaaggaaagtagcaaatgacacctctttttacttgaccctaagtctcagatctcctactgcagggtggtggactgtaaggtatggttgagccaaaggcttgatgccctggagaccctgaagatttagtaggagcttcgcctgctctcagcaccaatcccctgtcatatagccatagccccctatagatttgtggttatcagtagctgaagggcaatgcccaagcccttccacatatagatgaagcatctctaacatctcggaccaagaggcatgactacagtcatgtaagctcaaaacagagttctctatgccaatgaggtacctagaggtcgagagggcattccaataagcttcctttcccatacatttctccctgcaaaaggtatatcatctcatgccaaccctgagaagtggggtatggttctacagatccattttccaccatgacaataataaactgtttgggaccatggaatgcctctttttttattgtgatcaacagtgggaagacatggagaaggccttcgcctacagagtcacagtctagtctctgaaagaaggcatctttgcattctcagccacgatcaccaccaagcctgccactatcaagccaaagacaatttctgcagggactagctggagctcctcccccatgtccaagatcctgagaacccacagttctggggagcaccgaaccagtacggagtcaaactcccccatccagtctccacaagtggccgtgctcagtggtgggacagacttgtgatgacacaaccctacatcctacaacatgtgaaaggatatgactgtttggaaattctcttgccaaatgaacacatcaactaaatttcagaggagcattcaggggagaagaatctctcagtctgtcagtaccttagtatccacaagtcgacatttgttgaacataaaaaaatgaaaagagcagaatttctgagtgtgagaggttgacaatgaggcttctgacaaagcttcatgtttcaaatataatattcaatgtcatgtttttctttttctcagcacattttttgaaaaggcaagtgctttctggctctgctggatatttgtgaagacacggatcacatgagaacataaaactttgtaagctttaaagccttgcttctcgtccgagtgtggcagtggaacaacagcatctccatctttgaggggcttgttaaaattttggaccatttcctttgtcccacaacctgccagatcagaaaggacgttttgacgagctgcccatgtgattccagtagacactgtttaaaagtgttgctgtagagtgccgctataacaggaacttgagaacttaacataactgatgttatgacgcaagtaccattccctaatgctcctgcaatcttttcatatcacctcaagttgtagggacagccaaccataaaattatttctgtttctacatcataactgtaatttttctaccgttatggattgtactataaatatctaatatgcaggatagtcttaggcaatcgctgtgcaagggtcatttgtccccaccaagggttcatgacccacagattgtgaactacccatttagaccctaaaagctcagcacatagacagtacacaacaaagacaaagatctgatccatcaaagttcatagttctagaaccatctctaaatgcaccacctttggatttttggcttctgtagttctgctttggctaactgttcttactaacacaattccggaggtggtttcactctgagaaaggttcaggattatacaggatcatgaatacccagtgttgtctctacccagctgataaagactttctattgtcttaaacccatgtccatgcactcttctctggtggacaacccacaacattagctaatactttcacacctctcataagagcttttatttttaattaaattttaattttgcatgcaaaataatgtttttattatgacattatatatatttatccatatatgcataaatatatacatatatgtcattacatatacatatatataatgtctatatatgtatataacaaatcattgttcttatttgtttaccccttactcctctacccttctccaacctcttctttttggtctcctttctcctcctaaataaacctcccttctgatttcatgacccatgtgacctaacgtttataaggctacctatttttctgtacccagagcatgtgactaaacaatttgtcccttctcatcattttctgggcactccacactccaatccagagaagctatctcctaatctactcttgaagtaacagtttgaaaattagatcaccatgctggctctttaagtaaaacctagccttcctatttactgcacaggtgcaggccataccagtcagaaaagggaagagccccaccagataactgaaccctcctgataactaggtttggagcccaaacacccaagccactgacaccaccaccctactgcctgctcccacttcttgcacttgcctctacgcaggtgactctccagagcacaggtgcaggccaggctaatgagaatgagtaagaggcccatctgcactcagaaacctcctatgcccttggtttggatccccaaggcacactctgtagacatcctttctgtgttttatcacccacagagctcagttaatatttttaacaaaaccatagaggaaaaatttcctaaccttaagaaggacatgtttctaaaggcagaaaaatctcttaagacacaaatggattgaattggaaaagaaagtccctggtcaactaataatcaaaacactgaacatgcagaacaaagaaaaatattaaaagctgcaagagaaaaaaggccaaataacatgaaaaggtagaattattagaattatatttaatttcttaacagagaccctaaaagccagaatagcctggacatatgtcttacaggctctgagagaccatagataccatcctagactcgtctaacaagcaaaacttaaaataaaaagatttatttttatatgagtataccactggtctcttcagattcaccagaagaaggcatcagatcacattacagatgtttgtgaggcaccatatggttgctgggaattgaacttaggatctcggtgctcttaatcactgagccatctctccagcccgccagcaaaactgttcatcctcatagatgggtaagacaagatactgcatgacaaagtcaaatttaaacaaaatctactcataaatccaggcatatcgaggtacaaatggaaatcaacaaccctaggaggttaactacacccatgaagaaataaataagctcatacaaaaattagagggaaacacacacacacacacacacacacacacacacactagcactaccataaacaacaacaaaataataagaattaacacttattaatcattagtatctctcaatatcagtggactcaattcctcaaaaggcacaggctaacagaatgaataccaaagcaggatttatccgtttgttacatataagaagcacacctcatcatcaaagctagatattacctaagagttgagggtttggaaaaagattttccaagcaaatgtacccaagaaacaagctgttgtatctgttgtaatataagacaaatcgacttcaaaacaaaaattaatcaagtagacagaggacacttcatatttaccacaggaaaaccccaccaagatgatgtctcaattctaaacatctatgcccctcaaagcaaggacacccacatttgtaaaaccacacatcaaaacacatgtattaagtcgggcgtggtggcgcacgcctttaatcccagcacttgggaggcagaggcaggcagatttctgagttcgaggccagcctggtctacaaagtgagttccaggacagccagggctatacaaagaaaccctgtgttgaagcccccccccaaatatgtatttacagtgggagacatcaggtcattcagacaaaaacttaacagagaaataatggagttaacagactaacagacttaacgtggacttaacagttatctacagaacatttcacccaaataaaaacaatatacattcttctcagaaccccatgaaacttctttttcaaaattgaccacagactctgttacaaagcaagtctctacagatccaagaaaactggaacaactcccccatctcatcagaccatcatagattaaagatgaattttatcaacaacagaaagaacaaaaagcttaaaaacttatgtaaactgaacaactctctactgaatgacccctgggtcaaacagaaataaaggaagatattaaagactttctagaactcaatgaaaatgaatgcacaacatacacaaacctatggcacacaatgaaagcagtgctaagcggaaagttcataacactaagaaccttcatatagaaattagagagatttaatactagcaacttaacagcacccctaaaagctctagaataaaataagcaaatacacccaagaggagtagatggcacgaaataaactcggggatgaaatcagtaaaatagacacaaagagagcaatacaaagaattaatgaaacaaagggttagttctttgagaaaatcaacaagacaaaatcaacaagacagacaagccattatccaaaccaactaaaaggcagagagagagagagagagagagagagagagagagagagagagagagaatatcttaacaaaatcagaaaagaaaaggggggcatgataacagatactgaggaaatacaaagaatcattaggtcgcacttcaaaaacttactccacaaaattagaaaacctaaaagaaatggacaactttctcaatagataccacttatcaagatcagataaacaattaaaatagacctatgacctataaggaaggaatcacaggaagcagtcatttgaaaaggctcccaactcccctacctcacaaaaaggaaaccctcaaacaagagctaatatcaataatccttaaattattccacaaaatagaaatagaaggaacatcaccaaattcatttcatgaggccacagtcaccatgatacccaatctgcaaaaagactcaacaaggaaagagaattacagaccaatttttgcccatgaacattggtataaaaatactcaagaaaatatctacaaactaaatccaatatacataaaagatgtgttcaacatgaccacataggacacatcacagagattcagggatggctctacatatgaaaatctgtcaatgtaattcaccatacaaacagtgaaaaaatacccgacgtgatcatctcattagatactacaaaagcctttaacaaaacacaacactccttcatgatacaagacttagagagatcaaggatataagggacatacctaaacatagcaaagacaatatacagtaggtggatagccaacatcatgttaagtagagagaaactcaatgcaattttacaaaaatcagggacaagacaagactgtccatagtacttgacattctagctagagtaataagacaaccaaaggagatcaagaggaatacaatttggaaaggactaagtcaatgtattattattttcagatgatatagtagcatatacaagcagcccataaaatttttccaggaaactcatacaggtgataaataccttcagcaaagcagctggatacaagattaactaaaataaataataaataaataaataaataattcagtatccttataaacatcaaatgggttgagaaaaaagaaatcaaggaagcaacacacttcatggtagataaagataatataaaatatattggggcaactgtaactaagaaactgaaaagcttatatgataaaagctttaggtctttgaagaaagaaattgaagatgtcagaagattaaaagttctcttatgctcatggacctgtgagattaacatagtaaaaaaaagcaatctacagactcaatgcaaaccccatcaaaattctaaaaaaatttctttacagacctggaaagaacaattctcaacttcaaatggaaaaccaaaaaaccaaggatagctaaaacaatcctgtacaaaaaaagaacttcctaaaactaccacacccctgattctaagctctttgacagagctatcatcataaaaacacatggtataggcataaatacagacaacttgatcagtgcaatcgaatcaaagacccagatgtaaatccgcacacctgtggacacctgattttttattaaagaagacataattatacaatggagaaataaagcatcatcaacaaatggtgctggtttaactggatgttggcaagtagaagactgcaaatagatccatgtatattaccctgcacaaaactcaaggccacatgaaccagagacaccaacatcaaaacattgcacctgatagaaaagaaaggaatagccttgaatgcattggcacagaagacaacttcctgaagagaacatcaatagtgcaggcattaagatggacatttaataaatgtttcctcatgacactgaaaagcttctgtaaggcaaaggacaccatcaaaaggacaaaatattcaaggtacagaatgggaaaagatatacactaactccacacctgacagacagctaatttctaaaatatgtaaaatcaagcaagcaagcaagcaagcaaacaaacaaacaaaaaaccctcaagaatctagacatcaacaaacaatccaatttaaaaatggggtacagctagttgtggtggtgcacacctttaatcccagcactcagaggcagaggcaggcagatctctgagtgaggccagactggtctatagagatatgtccaggaaagacagagaaactctgtcttaaagctccttaagacccaactataccaatcctgagcatatacccacagaacagtccacaaggacagttgctcaactatgtttataccagctttatcatgaaatttgcaggaaatgaacagatctagaaaaaagtcatccatagtgagacccagagagaaaaacacggtacacattcagttataagagtatattctctgtaaagtaaagaatcagactcagagaggctaagcaacaaggaaggctcagtgtgtggggggcacatgaatttcccttggaagataaagtagaatagatattgtgggtagactaggttgggtagggaggaggacaagaagaatcatgtggggaagggggaggacatggagcaagcgagagagagagggagagagagagagagagagagagagagagagagagagagagagagagagagagagagagagaactggaaagaggagaaggacattttggcagtgatgcagaaacctaacacaatggaagctcccagcaatctacaagggtgacctagctaggatccctagaaagtgaggacacagaaccttaactagccatctcctataactagatatccagtggagggattaggataccaactcaacctcagcacattcaacttataatttttcctgcctacaagatgtactgtggtgatacaaaaattgggggagtggccaaccaatggctggttcagcttgaaacccatagagagagagcccagggctgatactgactggaaggtcaggacccagagagaggctggatatcccagacacctcagatagaaccaaacactattgaaaaaaataagtcaatgaaatgattcctagttaggttctgctgtacttgtagacaggagtctagcaccatcatcatgagagtggtttcatctagtaactgatgcaaacagatgcagagacccacagcctaacattaagtggagctagaggaattcttggaaggagggcggagttgtaggagctagctgggtcaaggatgccacagaaaagcccacagaatcaactaacctggattaataggggctcacagacactgaatcaatagccagtgagcctacatggactgaccgatgccctctgcatatatattatggttttgtagcttagtcttctgtgggacttgtaacagtggaagcaaggggtgtctctgtctcttttggcctgcttttgggaccctcctcttttccactgaggcaccttgtccagccttcatacaagggaaggggcctagctttgttgcaatttgatatgtcatgtttggttgctatccctgtgaagactgcccttttccgatgggaaatggaggaggaatgggtgaactgggaggaggcaaaggggaggttcaggaggagtgaggggagaggagacagggtaagctgtgaactggatataatatatgaggagaaaaaataaattaataaaagagagagcaacagcaatccacgttttctttgcctaagcagattctacacaggtagtagacgtaaacaattccttttctgaaactttatgcatgtgtttaagtacatgaaattcagttttccagcaatgatatcatgcgctatatatagctacataacttgtttggtttaaatgacctcatttacttccttgttattaacctaaaagcacctttccactatacaaaattttctctaaagtacgttttgaggaaacatctgcttttacacaatggcagattccaatcagcttccctgcaaaggtgtggtgctgttgaatactccagcagtagtaaccttgccttcccacagttttgttttctgggagggcacatctaggcaacgccttgattttgcttgtcaatttacctgaggcttttgggagggccaggtgatggttatgtatacacagaaagagggtcagatccaagcacacggctagagcgcggcaggagtggtgaggtccagatcccatgggcctagagcatctgacaaagacagaaaactggagccaggctcacatggaaatcgggaaaaccatgctgagaagacaacagcaaggacttactgcattgttcctttcttttaaaaaaattagatattttctttacttacatttcaaattttatcccctttcttcctttcccctctgaaagctatcctgtctcaccccctcccccctgcttactaacacatccactcctacttccctgtcctggcattcccatacactgggacatcgagtcttcacaaggctaagggcctctcctctcattgatgtcccacaaggccatcctctactacattgagtccctccgtgtgtactctttggttggtggtttagtccctgggagttctgggggtactagttggttcttattgttgttcctcctatggggctgcaaacctagtcagctccttgggtcctttctctagctcctctattggggaccctgtgctcagtccaatgcatggctgtgaacctccacttctgtatttgtcaggcactgggagagcctctcaggagacagctgtatcaggctcctctcagcaagtacttgttggcatccacaatagtgtctgggtttggtaattgtatatagtacggatcctcaggtaggacagacactggaggccatttccttcagtctctgcttcccactttctctctgtatctcttcccatgggtattttgatcccccttctaagaaggatcgaagtatccacaccgtggtcttccttcatcttgagattcatgtgatctgtgaattgtatcttgggtattccgagcttttgggctaatatccacctatgagttcacagcagccttatttataatagccagaagcaggaaataacccagatgtctttcaacatagaaatgtattattcctttcttacagtaagagggagatttctatttccttacagggcagtgacataatagtagcatccttctgattggctaaattgttcttcaatcacagttgagaagttatatctgtgagagagggttgactgctaggagaacaatgattagtaagttggaaggacaaacgaataccttttctgtcctcattgtacggatcaatacaaatctacttctaaagccggacgtggtggcgcacacctttgatcccagcactggggaggcagagggaggcagatttctgagttcgaggccagcctggtatacaaagtgagttccaggacagccagggctacacagagaaaccctgtctcaaaaaacaaaaaacagttccaggactcagcagaacttaggaaattagtctgaacaggtgagagggtgcgccagagaaccggacagcttctgggataggcggaagcacagagccactgaggcagcacccttggcgggctgcagacagccggccaccgtccggaccagaggacaggtgtccgcctggcttgggaggcggcctcagcctcagcagcagcggtcgccatcctggttccaggactccgtggaacttaggaaattagtccgaacaggtgagagggtgcgccagagaaccagacagcttctgggataggcggaagcacagagccgctgaggcagcacccttggcgggccacagacagccggccaccgtccggaccagaggacaggtgtccgcttggcttgggaggcggcctcagcctcaggagcagcggtcgccatcttggttccgggactccctggaacttaggaatttagtctgcacaggtgagagtctgcaccacagaagctgacagcttctgggaactgccaaagcaacacagcttcggagaaaggccctgttttgggccttctttttcggccaggaggaggtccaaaaacaagatatctgcgcaccttccctgtaagagagcttgccagcagagagtgctctgagcactgaaactcagaggagagaatctgtctcccaggtctgctgatagacggtaacagaatcaccagaagaacaatctctaaacagagtcaactctaactactaactccagagattaccagatggcaaaaggtaaacgtaggaatctttctaacaggaaccaagaccactcaccatcatcagaacccagcactcccacttcgtccagtccaggacaccccaacacacccgaaaacctagacctagatttaaaagcatatctcatgatgatggtagaggacatcaagaaggactttaataaatcacttaaagaaatacaggagaacactgctaaaaagttacaagtccttaaagaaaaacaggaaaacacaatcaaacaggtagaagtccttacagaaaaagaggaaaaaacatccaaacaggtgatggaaatgaacaaaaccatactagacctaaaaagggaagtagacacaataaagaaaactcaaagtgaggcaacactggagatagaaaccctaggaaagaaatctggaaccatagatttgagcatcagcaacagaatacaagagatggaagagagaatctcaggtgcagaagattccatagagaacatcggcacaacaatcaaagaaaatggaaaatgcaaaaagatcctaactcaaaatatccaggaaatcgaggacacaatgagaagaccaaacctacggggataataggaatggatgagaatgaagattttcaactcaaaggaccaacaaacatcttcaacaaaattattgaagaaaacttcccaaatctaaagaaagagatgcctatgaacatacaagaagcctacagaactccaaatagactggaccagaaaagaaattcctcccgacacataataatcagaacaacaaatgcactaaataaagatagaatactaaaagcagtaagggaaaaaggtcaagtaacatataaaggcaagcctatcagaattacaccagatttttcaccagagactatgaaagccagaagagcctggacagatgttatacagacactaagagaacacaaattccagcccaggctactatacccagccaaactctcaattaccatagatggagaaactaaagtattccacgacaaaaccaaattcacacattatctctccatgaatccagcccttcaaaggataataacagaaaaaaaccaatacaagaatgggaacaacgccctagaaaaaacaggaaggtaatccctcaacaaacctaaaagaagacagccacaagaacagaatgccaactttaacaacaaaaataacaggaagcaataattacttttccttaatatctcttaacatcaatggtctcaactccctaataaaaagacatagactaacaaactggctacacaaacaagacccaacattttgctgcttacaggaaacacatctcagagaaaaagatagacactacctcagaatgaaaggctggaaaacaattttccaagcaaatggtatgaagaaacaagctggagtagccatcctaatatctgataagattgacttccaacccaaagtcatcaaaaaagacaaggaaaggcacttcgttctcatcaaaggtaaaatcctccaagaggaactctcaatactgaatatctatgctccaaatacaagggcagccacattcattaaagaaactttagtaaagctcaaagcacacattgcacctcacacaataatagtgggagacttcaacacaccactttcaccaatggacagatcatggaaacagaaactaaacagggacacactgaaactaacagaagtgatgaaacaaatggatctgacagatatctacagaacattttatcctaaaacaaaaggatataccttcttctcagcacctcatggtaccttctccaaaattgaccacataataggtcacaaaacaggcctcaacagattcaaaaatattgaaattgtcccatgtatcctatcagatcaccatgcactaaggctgattttcaataacaaaataaataatagaaaaccaacattcacatggaaactgaacaacactcttctcaatgataccttggtcaaggaaggaataaagaaagaaattaaagactttttagagtttaatgaaaatgaagccacaacgtacccaaacctttgggacacaatgaaagcatttctaagagggaaactcatagctctgagtgcctccaagaagaaacgggagagagcacatactatcagcttgacaacacatctaaaagctctagaaaaaaaaggaagcaaattcacccaagaggagtagacggcaggaaataatcaaactcaggggtgaaatcaaccaagtggaaacaagaagaactattcaaagaattaaccaaaggaggagttggttctttgagaaaatcaacaagatagataaacccttagctagactcactagagggcacagggacaaaatcctaattaacaaaatcagaaatgaaaagggagacataacaacagatcatgaagaaatccaaaacaccatcagatccttctacaaaaggctatactcaacaaaactggaaaacctggacgaaatggacaaatttctggacagataccaggtaccaaagttgaatcaggatcaagttgaccttctaaacagtcccatatcccctaaagaaatagaagcagttataaatagtctcccagccaaaaaaagcccaggaccagacgggtttagtgcagagttctatcagaccttcaaagaagatctaattccagttctgcacaaactttttcacaagatagaagtagaatgtactctacccaactcattttatgaagccactattactctgatacctaaaccacagaaagatccaacaaagatagagaacttcagaccaatttctcttatgaatatcgatgcaaaaatcctcaataaaattctcgctaaccgaatccaagaacacattaaagcaatcatccatcctgaccaagtaggttttattccagggatgcagggatggtttaatatacgaaaatctatcaatgtaatccattatataaataaactcaaagacaaaaaccacatgatcatctcgttagatgcagaaaaagcatttgacaagatccaacacccattcatgataaaagttctggaaagatcaggaattcaaggcccatacctaaacatgataaaagcaatctacagcaaaccagtagccaacatcaaagtaaatggagagaagctggaagcaatcccactaaaatcagggactagacaaggctgcccactttctccctaccttttcaacatagtacttgaagtattagccagagcaattcgacaacaaaaggagatcaagggatacaaattagaaaagaggaagtcaaaatatcactttttgcagatgatatgatagtatatataagtgaccccaaaaattccaccagagaactcctaaacctgataaacagcttcggtgaagtagctggatataaaataaactcaaagaagtcaatggcctttctctatacaaaaaataatcaggctgagaaagaaattagggaaacaacacccttctcaatagtcacaaataatataaaatatctcggcgtgactctaactaaggaagtgaaagaactgtatgataaaaacttcaagtctctgaagaaagaaattaaagaagatctcagaagatggaaggatctcacatgttcatggattggcaggatcaacattgtaaaaatggctatcttgccaaaagcaatttacagattcaatgcaatccccatcaaaattccaactcaattcttcaatgaattagaagtagcaatttgcaaattcatctggaataacaaaaaacccaggatagcaaaaactcttctcaaggataaaagaaactctggtggaatcaccatgcctgacctaaagctttactacagagcaattgtgataaaaactgcatggtactggtatagagacagacaagtagaccaatggaatagaattgaagactcagaaatgaacccacacacctatggtcacttgatcttcgacaagggagctaaaaccatccagtggaagaaagacagcatcatcaacaattggtgctggcacaactggttgttatcatgtagaagaatgcgaattgatccatacttatctccctgtactaaggtcaaatctaagtggatcaaggaacttcacttaaaaccagagacactgaaacttatagaggagaaagtggggaaaagccttgaagatatgggcacaggggaaaaattcctgaacagaacagcaatggcttgtgctgtaagatcgagaattgacaaatgggacctaatgaaactccaaagtttctgcaaggcaaaagacaccgtcaataagacaaaaagaccaccaacagattgggaaaggatctttacctatcctaaatcagataggggactaatatccaacatatataaagaactcaagaaggtggacttcagaaaatcaaataaccccattaaaaaatggggctcagaactgaacaaagaattctcacctgaggaataccgaatggcagagaagcacctgaaaaaatgttcaacatccttaatcatcagggaaatgcaaatcaaaacaaccctgagattccacctcacaccagtcagaatggctaagatcaaaaattcaggtgacagcagatgctggcgtggatgtggagaaagaggaacactcctccattgttggtgggattgcaggcttgtacaaccactctggaaatcagtctggcggttcctcagaaaactggacatagtactaccggaggatccagcaatacctctcctgggcatatatccagaagatgccccaactggtaagaaggacacatgctccactatgttcatagcagccctatttataatagccagaagctggaaagaacccagatgcccctcaacagaggaatggatacagaaaatgtggtacatctacacaatggagtgttactcagctattaaaaagaatgaatttatgaaattcctagccaaatggatggacctggagggcatcatcctgagtgaggtaacacattcacaaaggaactcacacaatatgtactcactgataagtggatattagcccaaaacctagtatacccaagatacaagatacaatttcctaaacacatgaaactcaagaagaatgaagactgaagtgtggacactatgcccctccttagaagtgggaacaaaacacccttggaaggagttacaaagacaaagtttggagctgagatgaaaggatggaccatgtagagactgccatatccagggatccaccccataatcagcatccaaacgctgacaccattgcatacactagcaagattttatcgaaaggacccagaggtagctgtctcttgtgagactatgccggggcctagcaaacacataagtggatgctcacagtcagctattggatggatcacagggcccccaatggaggagctggagaaattacccaaggagctaaagggaactgcaaccctataggtggaacaacattatgaactaaccagtaccccggagctcttgactctagctgcatatgtatcaaaagatggcctagataggccatcactggaaagagaggcccattggacacgcaaattttatatgccccagtacaggggaacgccagggccaaaaagggagagtgggtgggtaggggagtgggggtgggtgggtatgggggacttttggtatagcattggaaatgtaaatgagctaaatacctaataaaaaataaaaacaaaaaacaaaaaacaaacaacaacaacaacaaaaaacccaaaacaaacaaatctacttctaacaatctcactagactatgggggctggaaaccagggcccccttcactgttattactactttcttcttttccaacattacaagaccatgatactatttttgggaaatgtcatatggaaaattgacacctgttctgctcatatgttcccacacaggacagtttcaacagaatttgcatggcttttcccatgtcttatttcttttgttcctacttgttgatataaaagcaaagcaaagcaaagcaaagcaaagcaaagcaaagcaaagcaaagcaaagcaaagcaaagcaaagcaaagcaaaacaaaacaaaacaaaacaagcctcacgaaacagtatagtgtcactgtattagagaagatcagaatcccagccccagccacacagaagcaatgtgagtgagcctcaggcccttgctcctgctaagttcccattggtgaattcctaagtggaaccatactgtggctactgtgaaaaacacggaagcggccacacaaaaaccaccctgaagtatcaaattctgtttctttagctgtattcctaggattactggatcatgtggggattttactttaagtcagagtgtacatactgctgtgttctgctctgtaggagagaagagaagagagagagagacatagatttggtaccttgtgatctcaactttattatttttttcttaaaagtgatagcatcaaaagaacctatctttttaaacttctgtgggtctcagaacatataatgtgtgaatttacttagaaatgtggataaactattgcaattatcaggtaataattttgcctaatagaaatagagttacatacatcttagaccagatttctgagttcactcagatctcagcttgtacttgtagaacaggatatcaaaaaagctcttagaagtagaaaaagtgtgtgtgtgtgtgtttatgtatgtatgtatttgtgtgtgtgcttgtctgtgtgtttgtgtgcttgtgtatatgtgcatgtatgtgtttatgagtaggtgtgcttatgtatatgtatgcatgcatgtatacatttgtgtttttgtaaagtttgtatatttctaccatacatatacacgctagaaaatatctggactgtgttgctaagttttttgaggtaataattcctgggaagagattacttgactttctgaagctctaacatagactacgtataatttgaaaggccatgagagttagtataacttggatgcaaagacgactgtgaatataacactctttccagctctatgacataatatattccatctatttccttctgggtgcatagtcctacactggggtccttgattgcctgtgttcattaatgagtttgtgtgtctacatctggataaaaagctacggaaagacagactattgtacatgtcacacgaggaaactggggcactcctggatgttgcagggatggcaaagaggggagggataagaggtgcagaaaaaaaaaatgagaatataaatccctatcttcagttaagtggattcaatctaatctaaaagtctttcactttgctaaatatttggtataggctagtagtggagggtgtctgggccatctggagacttcaggacaaacaggatggtgaagagctaggtccctgggaagctgcagaaagagttcggctttccacagtctgtgggtacttaactgaattacacatgcactttcatgaatatgatggggtctaaatttactatattacatacgtggccatatatttatttctattgtaatttaacttaccagtaggagaagcaacacatttgttgtcttgtttactataatgtaattgttcataagaaagataatctaaattggatgtacttaaattgctgtgtgggaacagttctgccttggggggacatttgttagtctctaccagcacatcagttcaacaggttagtgatagtggtcagaattctgctatgcacaagagagacccctaagaattcctgaccccaaaccccaaaaatactagctggttttgtatgtcaacttgacacagctggagttatcacagagaaagaagcgtcccttgaggaaatgcctccatgagatctagccgtaaggcatttctcaatgtgggtggtgccatgcctggactggtagtcctgggttctataagaaagcaagctgagcaagccacacaaagcaatccagtaaggagcactcctccatggcctctgcatcagctcctgcctctaagttcctgtcctgtgtgagttcctgttccagcttcctttggtgatgaacagcaatgtggacgtgttagctcaataaaccctttcctccctaacttgcttcttgatcatgttttgtgcaggaacacaaagcctgactaagacacccaattaggcccagccgcaatcttgtgttagaacaatcacttactttacagagagaaactgagcaccaaaggggccagtgatatgtgcaaagtcgctctgagcatataagagaggtaggtcctctagtgtatttacatcgtgccatttagcttcaaagagctagtattccacatggaactgctgaaaaaccaatattgctgggaaccccttgcacttcagatatggtacataactgcacagtaaacatcagtccacagctagccatagttaggccaggcaagaagaaacagagaatttaattatgtaacacctattcagatattgtatgaaaaccattttcatatctgaccaagttactgtcccatgtactggatcttcacacacctcactactgcctggaggttgtaagaacttgcatttctagaacctacaaagggaagttctaagtgtgtctgccctgaggcccaaagacgggcatttccaaatgttccattcagatgctgacatagctagtagctagctttctcagaccactgagaaacactgcctaacatttgatggggaaatggcaaatgctggtctaagagtaaacttgaatctcacccttcatgtaatctcactttaagagtgattaatgttaattcacacaaaggactataatcatataagtggtaatttagacataattcaaatttcaaaaagtctaaaaaggaagaaatctgtaggtttttgatagcctatagagacaacattaaggaataatcatatgttatttgaggagaagagtgataccctaaatataataagtattatataaaaatattatatataaaataccctaaattggaagacatccaaacaaataatataaatattattctgtatgcattctttatttttaacattttatttctgctagactgagtgaccttgatctattgggcctgccgagctgtatctacggggatcgttgctattgacatcagtaatataaaatcaggcctttagggagccgtaactgtctcttcaaatgatttgggaaaatgtgtacatcttcaatcaattaaatacaggacaaatttagtcaatcacaaatgatcaacacgcccctgttcattgtgcttagcagtatgaaaatggcacccaggcaaattgatttcggtaacactccttttcattcttttaattcaatagtgagaagaatataaggcagttttcaatgttctatccacagtaatcctgtagttagtctgccttactgcttacaccagagctcatttgaagacacccaagcaaatgacaggaaacttttaactctggtcaagtcccaatcacagacccttgcttgccaaggacacaaaggaagccaaactttcaaacatgctgcattgatctccaactttttaaatccctctgtcattttaaatgaggtgcactcggttgtgtcatcatctcggttttaattgtgtgaaaatttcctgccaatctcacaccgctgcggcaacctcaccttgctacttgccctgcaagttctgcagtgtgccgttctgagtatgccgttttaactagttcttgcagcaggacacaaagcgagatagtctgatagaaccagttctcctctggttttacctttactcttagatgagttaagggtcacatcaaaccagggctcagcccgccagatctcctaagcacagcccctcctgacccaatgcagttaacccaacctcattcagcgctagtatcaaatgacactggagctgctgcagtatgcatcccgagactaagtaggcaggatttattatcagcagaagtcccctaactaccaggttattcaagctccgttcttgtcacaaacaggcgcggcggaagacacagtgcagcagactcagagctcatttacaagacaagcgaattctcagttagagacaagggcagcgcggcagcgaactgcagtaaatcttttcacgctcacagcaacatctaacaatgctctcctgcaacgcctcagatcaaacgaatcctacttggtttaaacatcaaatcaacaccataaaaaaggcttcattagcaaagttcaatttaggatgtttttaatcgtgtcttaattctagaaccagtgcgagactttccatgcttattcaagcatgctgacagaattggaacctcttagaattgcctacctgcacctatcagcctggctgacaggagcccgccaaaggattaaaaaaaaacaaaacccaaaacataaaatcatgcaaaaaaatatttacccccgaaagatgtatgtagttaaagctcagcttcctgcagcctcgatagcccctgaagtgttaatctgaagaaacagttccatgagtttccacaggccggtagtgagtctcctacacttgacctagacagacttacat

SEQ ID NO: 12 - RNA, 170057 nt, Mus musculus
  source 1..170057: mol_type = genomic RNA
taaaataaaaaattaattttattagatttgcacattttttaattgtgattagcatcattttgggctaatagtagcattttccaacatgcagttcatgaatacggtttgcctaaatattttttttttaagaaaaagaggtgcctacggtctgcttctgtaagaaacacaaatatcttgatgtaattgactatataagtgtaatcctctctgattttgaggaaaagaaattctgaagcccacatttatatttagaacaatctaaagaagcatgatttcaaagcaaagaaaaataaacagaaattggggaaataaagaaaaaaatgagaaaaaaaagcactctggtcatctgttagcacaaacactacaataaatataaatcaaatgttataccttttccaattgcaaatcataatttggatgtgaagttgtgagtgtattttgccccttaaaattatgaaataatccaaaattaacaattgtaataaaaaagcagagatctaccactacccagtcatagtttcatttcttagttagcaaatatcttccatgaaaaactgctgtggacagaaagtaagaaaagtgattgtgatatcaacctgaagataatttcctcttcatatgtacataatgctgaaaagtaaaagaaagtgactttgtacagtatttatatttgcttataaaactctaaacatgtttttaacaggttaagcagtagtgttgtcttttgaacacgtatgtacagtctggctatacattgaacgttatccacttaaattttaaaaacaacccaaacattgttaaagtgctgcaaactattgcttaatgacttaaagaaatgaagtctgctgaacagtttccttgacttagccactgacctatggtttctcgtgagtgagattctgagtgctgagagaaactagataccgcaacgtggtaatatcgacatgcattggcagcatccacactatctacaatggtacagagtacagtatatttccggtggacagcttgcactctacatttctcgtggtacatatttgatgcaataaatactgtgcttacgtcattatttgtttgctcaaacgtgcaccacagagtaaaatgactatttacataataaatagcatttcattaacacatacagtgtcaaccttgctgagagctgaagatggctaaacaaagtgcaggaggaagcggggatttataaagggttcttttggtcaattcgctctgctagggttgggggtagggagtcagagtcataatttagagacctttcagagacagtgaacagaaatgtagcgtgactccagacatttgaatgaagtttgcacctcctaagacttgatgacctgtctgaacaatctccttggactaaggactagattttgacaaacccagctcagcaaagcccacgatctagcgatcacctccgtaccgccccctccccccgcagaaacacagatgacatagaactgttgaagaactgtctttgctttcctttcgactttttctcatgcatgatcctaaggtgcaacatgccctcatgcgaaaccacaccgttgtgcagacgggagggccataaggatgtcaacactcccaggtgacacaccgggaaaagagttcctttagtctatttcccaacagaaaccctgcttacaaaaatagtcacatgtaacaaacaacacatggattaaaaaaaagatgaatccactaacagagtttgtaaaaaacctgacaaatgtggcagttgaaatgcaaacggtggatagagttactacactaaagtgtttcacattaacccccaaattatagctctgcacccctttagactgatccctacagtctgcatagccatttgtctcttgtcttcagcagtgtcagctggtagttagaacagtaccctcctgtcaaggttatctcccctttacacagtcacagagtttgccgacaagggggtcactgtcttattgaggcactgaccttaaagtgaatttgtgtaaaaacagtcagtttggcattgacttcttaaaggagtccttttgacttcacaggctgtaaacaatttgtcacccaatttattatttttttttgttgtttttgttcatttccctttggctttttcatccttcccttcctgctcgtgtttctccacgattggctttgtcacccgatcgtaggagggcggacaagctgctgtggacattgtcaggtcagttttctccgtaatagagttttcgtttattctgtcaatgagcatgtcttcttttacaagaagattagccccacctttgagtttgttcttattgtatgtgaatgaagcttgttttactgttcgcttcaaaaggtggcgcctataagctcgctgaatgataacagctgacacctcctcttgtttgcgttttaatgtagtagtgatgggctgataagagaccttggaggggttggaagccatgaaccgctcttccatctggattcgaagagcatccatctctccactctcacccaacacccgctttgtaaaagcaaataagatgtccaggcagtggatgcggtctccactcaccatgggcaggtccatggcaatgagctgaagtttgtttggttgtggcaaattgagagggggttctagagcagctgcaaactgagataatttttcaaattccatgaactgggtggcgtcagggtcgaacttctcccagacctcgtagaacatctcaaagtcgtcctcactcagaggctctgcactttcttctgtggcaacgctgaagttctccaggatgacagcaatgtacatgttcaccacaaccaggaaggatatgatgatgtagctgacaaaaaagaaaatccccacagatgggttcccacagtctcccttcaccgagcttccagggttaactttattagggtcacagtcagggggtttgctgttgaggatgggggccagcagtccatcccagcccgcagaggtggtgatttggaacaggcagatcatgctgttgccgaaggtctcaaagttgaacatgtcatcaatcccaacttccctcttaacataggcaaagttggacatcccaaagatggcgtagatgaacatgacgagaaaaagcaggaggccgatgttaaacagcgcaggaagggacatcatcagagcaaagagcagcgtgcggatccccttggcacctttgatcaggcgtaggattcgtccaatcctggccaggcggatgactcggaacagggtaggagacacaaaatacttttctattagctccgcaagaaacatccctgtgggaagataattaaactatcaatcagtgaagaagtcatcaactaatcatttattaaaatatttgagttattaaagttccaatgtcaatttcagagtattaagattcaattttgtaatcttgggtatggtacaaatatattccaatcattttccagtatctgcagctgatttgtcccaggatgcacctctcctccttagaacatcaaaattcaaggactgaaagccctttatatcatatggcagcacatttgcatacaatttgtctataccattttattgaaagttttgaattatatttaaaatgttcatcacatttaacaatgaaagtaccatgtgaagagttgctgtgatattccagaaatccaatcctaactaaacaacaacaacaacaacaacaacaaaaaccaagtaaggctgagtggaggtggatcccagtactcaaaggcagagggaggggatctctgttagtgtgatggtagcctggtctacagaacgagtttcaggacagccaaggctacatagaggaaccctgacttgaaaaaccaaaccaaattaaaaccaaccaaccaaccaaccaaccaaccaaccaaccaaccaacaagaaaacaaacaaacaaacaaacaaacaaaaacaaaaaatccaaaacagaacagttgctaccgttcattatattaaaaatggtcaggagaggagcatggttcttaaaaatacttttgatctgtgtttgaattttcagatatttaatacatacatatggaaaactgagtgtttatagaattatacgatgtataataaaagttaactttagcttttactcagcctcagcaatagattaaaatttaagaatcatagtacagctcgcccccccaagagcatttatttatttatttatttatttatttatttatttatttatttttggtttttcgagacagggtttttctgtgtagctctagctgtcctggaactcagtctagaccaggctggcctagaactcagaaatctgcctgcctctgcctcccaagtgctgggattaaaggcatgtaccaccacgcctggcccgaagagtattgatatgctatggttaacttaaaatctcatcagaaataaatacgaaaatttgcttcaatgtcaacagccaacaatatatgaatatgatgttttttctctaaacttgttgaaccaaacttttctttttcacacttcactaatctgaagtcttggagtgtttcatgctgttttcatcctcatatgaactaatattattacagaattgtccgtgcatgtgcctgtgtgtttgcaaaacactccagggttgatgttcttttcctctcctgtagcaaaatctcaattttttaatttttacagctttttttctccctgtgattttgggttttttggcacatgtatgttcatgtggcatgtgctctctctctctctctctctctctctctctctctctctctctctcgtgagtgtgtgtgtgtgtgtgtgtgtgtgtgtgtgtgtgtgtgtgtgtgtgtcttacctgaggctgatgctgggagtctctttgattgctttctactttatgtatttattttcaatttttaaaatttttattggttattttatttatttacatttcaaatgttatcccccttctcattttcccctcccaaaccccctgcctctataagggtgttcccccaccatcccatcaactcccacctcagggccctagcatttcttttgcggggtcatcgagccatcacaggaccaagggcctccctttccattgatgaatgacaaggccatcctctgctacatatgtggctggagccatgctccatgtgtactctttggttggtggtttaggccctgggagctctgggagctttgggagctctggttggttgatattgttgttcctcctgtggggttgcaaaccccttcagctccttcagtccttgccctaactcctccattgcagtctctgtgctcaggacttctcaattgaacacagagctctctggtagcttgccagataatttgaggggttccaagagccttctttataaggtgtcacccttggccaggatttacactggtgctgggaatctgttctctcgttctcaagcttgcacactaagtgctttagatgccactgcatttctcagctcccccctctgtcctttaaataaagactccattaaagagtacttccaacacaaacacacacacacaccaccaccaccaccaccaccactaccatcaccaccactatcaccaccaccaccatcatcaccaccaccaccatcaccaccaccactgccaacagcaataacaacaacaaaaacctacctattcaaccaaccaaaatacccaaatgcatcattgtatgcaaagcacaaaagcatcattctctttagtcagccttctctatctcagtctctatctctgtctctttcggcctctctctttttgatgctatttacatgattattgttggaattaaaaattacatataacatatgggttggattttagatgtaaggcctatttattcagaggggggaatagcacacagatcattccaactgagtcctatgcttgaaaatttgcaatgatttcatcttaattaggaatgaagttcccatacagggacttcttcacttctctgaagcattgttggtatctgcagtgagatgagttaccttcatgaggctcttatgtactacacaatttgtaggataggactaagaaagagatgttccatgctaccagtttccttctggaaatattgaaaatttctgtatgaaagccacaagaaactactgttagtctacttgcatttcccatttacttctatccatgttctactctgcatgctggtgaccccattaactacatctctaatgtaatgtctttcctgaccttcagaccagattctcagtacccctcttaccagaatcatctagatcagtggatctaaaccttcctaatgctgcaaccctttaatacagtttctcatattgtggtgaccaccaatcataaagttattttgttgcttcttaataattgtaactttgctactgctatgaatcttaatgcaaatacctatgatttctaatggtcttaggtgacccctatgaaagggctattcaatccccaaagtgttgcgacctacagattgagaatcattgatctggatagcgtatagagtgtttaatctcaaccacctaaaagcactttttaaattttggttcaccacatcaatctatttaatatatctcaataaaggagatcttattaatggtcaaataaatatgtgatgcaatgggataaaatatttgtataaattagaagcctaattttggaagaaaaacaaatacaactcaaaaacacatgccaacatattgactttgagtagtgagatgccttccactctaaattcctgttttcaacctccacttttatcaggaggaatttgccagactttgcacagatcttacctacaatggagaggatgaccaccacaaaatcgaaaatgttccatccaatggtgaaataataatggcggagcgagatgagcttgagcacacactcgccggtgaacaggacgatgaacaccaggttgatgcgtgacaaaatgcttgtcacataatcgctctggtcatccgtttccaccatcatggtcaccatgttcagacagatgaggatcatgatgctgatatcaaacacttgtctggttacaaagtcaaaaaccattccttgaaatttgttctgcagagaaacaaagacactttcagcaatgcgggagattcctggtagacagcatatacattaaatacttcctatattccctactttctagtattgtacatagtacctacctattgggacaaatatttgtaattggtgccttgtagaacatttttatatctagttaattaaatttttgttttgaggcatgcatattcctgaatacatcaatcccttgctgtagattctttccctgcacactctttacagaaacacacagtgaatttcaacacatcaaggttacagaactgtaagaaatctgtttgatttgctgttgccaaactttggctcactggctgtagtactttccaatgagcagctagacaatgtggtcatttataaacgtaataaatattagtcttaaatttgctttgttcctagagaattatcaaaggaaccttgtgatttcaaggatgcatctgaaacaccaaacatttacattcctgctgggcaagtagcacttggggggtagaggcaggtggatttctgagccagcctggtctacaaagggaattccaggtcagtcagggctacacagagagaccctgtctcaaagagtaaaataaaataaaataaaataaatttacatttcaccttgacaacattaatttgttcccagcaagtggtctttgctgatattgtcagacaaataatgatgagtctccacaggggtaatcagactgaaaagacattgcttgctatgctataacaaagggagcacatgtccttcgctactcatgtgtagtcagctgaggttaggcccagtacaccatcttctgcttatttctttgggccactgaagaatcctaagcatattttagtaccataaaatacccctgctgtgcagtacttgacttgtgtagcactaagtatcaatggggaaaatgttctcattagacactttgcctcttcttagaactgggaacaaaacacccatggaaggagttacagagacaaagtttggagctgtgacgaaaggatggaccatctagagactgacatatctggggatccatcccataatcagcttccaaacactgacaccattgcacacactagcaagattttgctgaaaggacccagatagagctctctcttgtgagactatgccggggcctagcaaacacagaagtggatgctcacagtcagctattggatggatcacagggcccccaatggaggagctggagaaattacccaaggagctaaagggaactgcaaccctataggtggaacaacattatgaactaaccagtaccccggagctcttgtctctagctgcatatgtatgaaaagatggcctagtcggccatcactggaaagagaggcccattggacaggcaaactttatatgccccagtacaggggaatgccagggccaaaaagtgggaatgggtgggtaggggagtgggggggggtatgggggacttttggtatagcattggaaatgtaaatgaggaaaatacctaataaaaatattaaaaaaagaaagaaagaaagtagtgcttgaactggacagtagtagagcatgcttttaatcccagcactggggaagcagaggcaggtggatctgagttcaagaccagcctgatctacagtgtgagttccacaacagccaaaactccaaagaaaaaccctgcctccaaacaaacaaacaaacaaacaaacaaacaaacaaaattggctagtacaatagaaacattcactaagattctgttttgtaattcatcatggggaatattttaagcttaagatcactgccatagtcaaggacaccacaagaagacctacagtgtcaactatcctgggaccgtggagactcacaaagcctgggccaccatccagggagcgtggtggagctggatctaggtaccctacacatttgtagcaagtgtgcagcttgtcttcatgtgggttccctaacaagctgtctcagtctctgcttcctgtcactggagccccctcctcttacctagactgccaggttagtccttggtgggagaggatgtgtctagttctgatgggactagatgtcccatggtggagtggtataaaagggggatccccttctttgaggacaaggggaggggacaataggaagaaggatttgttgtgatggtgggactaggaagagaggagggagggaggctgtgattgggatataatgtgaataaaagaaataagttatggaaaaaaatcactgtcataaaaataaccatgataagggctctttctcctttatagtttgtagatgaatcttggaaatatgagaatggttatttattatcacaaattgtaataatgccgacataagcaattgctgattttagagccatacaaaaacatattcattactgggatgctcacctcctctaaaatggtccatatttctacttattaaacaacaattacaagtggagatgatatgccattgagcatcttttctacctctttaatcagaaagtaaatgaatattagccccaccctatgcttctgtattgcttgacattgcactgcagctactgtaaagtcataaagacacaactattgtgaggaccacattagtctacgtagtttggattctaagtgtgtagttgtaggtcatttggagacaaatttgcattttctgtatattcttattctttttggtctttaaaaaaaatatcaaaacatagattagagatactcaaaaggttttttttttcctttttcttttttcttttttcttttttcttttgtgctgggaatggtagttgatttcccctgagaaacaaaactcatttcaggttgttgctttatattattttcatttgatatttcttactccaggtcgagggataggcttttgtggcttttttgatcctaatttcttcattgcattatagtatttcttctgttcttctgtcataaagatgtcttgacctccaaagtatagaaaaaaaaatcaaagctggttaaaattgtatccattccctcataacttttcaatattataacaagagatttcaagagattaacatggttatccttgtgacttattttgaatttgaaaattaaaagtacactgtattgactataatacttaagttttaagataactaaaattggcattattattataattattgaaggaaaaaagcccagacatggtaaaacacaaagctccatcttccttctggcccacacttccacctacagtcagggaccagcaccctgagctctccttcacaacctgtctgcctcatgggagttcttctcccaccagaacaaccagctccatgtttcagtccacacctctacctgcaattggggatctataccctacacctcagccaacagctctgcttgcctctggggagggctttagctatctaggacaacaagtctctgagagttactactcccaaggacttacaggccagccaacaccagagaaaaaaatagatggcgaaaggcaagctcaatagaacaatagaataatcgctagaagccagtgcagtatggcaccttcagaactgagctctcttactacagcaagccctggatatcctaacacacctgaagagcaatacttgaccttaaatcccatcttatgaagacaatagaggccattaaagatgatataaataaagcatatgcagaatataggaaaatacaactaaacaggtagaaatctttaatgaggaaacaaataaatcccctaaagaaatatgaaaaatacaatcaaacgggtgaaagaaatgaataaaatggactcagatttaaaaatagaattagaagcattaaagaaaacacaaatggaagcaaccctggagatataaaactgaggaaagagagcagggactacacacataagaatcaccaacaaaatacaagagatggaagaaagaatctcagacagaggaaatgcaatagaaaaaaattaatacattgataaaggaaaatgccaaatgaaaaaagttcccaactcaaaacattcatgaagttgtgatacgatgaaaagactaaacctaagaataatagaaataaaagaaggtgaagattcccagttcaaagggctaaaaaatatcttaaacaaaactatagaagacaactttcctaacctaaagaaagggatcactatagaagcttacagaacatcattagattggaccagacaagaaaattttccttccacatattaaaacactaaatatatagaataaaagatagaatattaaaaactacaagggaaaagggccaagtaacatataaaagcatacctaatagaattatacctgacttcccaacgaacctctaaaagtcagaagatcttgcagatgctaagagactacagatagcagcccagactattatacccagtaaaactttcagtcatcatagatgaagaaaccaagatattctatgacaaacccaaatttaaagagaatctttctactaatacatcctataatggatactagaagaaaaactccaacacaagaagagtaactacacccaagaaagcacaagaaattaatcatcttacagtaaaaccaaaagaagagaatcacacacacacagaaccaccactaacatcaaaataagaggaactaacaatcattggtcattgataaatttgagtatcagtagactcaattcaccaataaaaagacaggctaacagacacgtaaacaatttccatcattttgtggcatacaagaaacacacctcagcaacaaaaaaagacactacctcagaataaaggcctcaaaaaaagttttccaagcaaatgaacccaagaaaccagctggagtagctattttaatagctaataaaatagactttcaaccaaaattggcaaaagagatggggaaggacacttcatactcatcaaagggagaatccactaagatgacatctcaattctgaacagctatgccccagaagcaaggaaactcacatttgtaaaaggaactttactaaggctcaaatcacacattgaaccctacacaataatagtaggaaatgtcaacatcccactttcaccaatggacaggtcattgaaacagaaactaaacagagaatcaatgaaactaacagaagttatgaaccaaatgaatttaacagatatctaaataaccaccccaaaaccaaagaatgtggcttctactcagcacttcatgagcattttctaaagctgaccatataattgggcacaaagcaagcctcaacagatacaagaagattcatattaccccttgcattgtatcaggtcaccagggattaaggctagacttaaaaaaaaaaaagaacaacaacaacaacaacaacaacaacaacaacaacaaaaacccagaaataacagaaagcccataaacttatggaaactgaataactctatactcaatgatcactaacttggtcaggaagaaatagagacagataccaggtgccaaagttaaatcaggataagaataaccatctacacattcctataacccctaaggaaatagaagcaggcattaaacttctcccaaccaaaaaaagtacagggtcagatggttttagtgcagaattctaccagaataccaatgctcctcaaactattccacaatatagaaacagaggaaacactacctagttcactctatgtggccacagtcactctgatacttgaattacacaaagactcaacaaagaaagaaaactacagaaccattttgtcaatgaaaattgatacaaaaataatcaataaaattctcccagacccaattcaagaacacatcaaaaacatcatcaccatgatcatataggcttcataccagtgatgcagggatggttcaatatgtaggaatccatcagtgtaatactagtactccccaaattcttccaaaaatagaaacagaagaaacactacctaattaattctatgaggccacagtaaccctgatacctaaaccacagaaagactcaacaaaggaagaaaacttcagaccaatttcacttatgaacatctacgcaaaaaacactcataaaatattcacaaaccaaattgaagaacacgtcaaacacataattcactacaaccaagtaggcctttcatcacagggatacagggatggttcaatatatgaaagaaaatctatcaatgcaatccactatacaaacaaactgaaagaaaaaaatcacatgatcatcacattagatgctgagaaaacctttgacaaatccaatactcctttatgttaatcataataaataaaaaatgaatgcaacgaacaaatagtatgaaatcatgggacataaagaaatataattggctgggatgaacttggatacatccaaaactatttgccataaaatgcacaaaaaataaagttaaattttgtttccctttaagagatgtcaaatattaacaactaaagggaatgtctggtgtctgtgagagtggtggagcaaggtcatgctcacatagcttattcagttgactagttatttaactacaaggaggcaatatacttcactctggaatttaatgtaagaaaagatttaaacactcaaatgttttgcaggaaaaaattacttaagtcactaaagattagatagattgaaattggccaagttatgataaataaacatgaacacttttaacaaactgagaaatctctgtgataaaagtatttaaaattgtacattgggaaacatttcagggctgggaccatggcttagtgcatataggcatttgcttacaatccaaatcacctggattcaatccctgggactcaaagggtggaaggagggagaccatatcctgtaagttgtctactgactaccacacacccagtgtggcatgaataaataactgtaattttaaaaagtatttcagagatggctgaagtgataaatttattacacattggcgtgaatataagctcagatcccaacccccatgttaaagtgggcatggcactatgttattaaaacaaaaaccaaatggtgatggggatgcagagataagatgaatccattaatctcactggccagccatcaatctgaattgaagaggagattcaatgagaactcctgtcttaaaaattatggtgggtagtgattgagaaaggtgactaatgtttatcactggcttttacatgcatgtgtacattcatcctcacagacacttgcacacaccaccacgaatacacatacaacacaacacaatacaacaacacacacacaacacacacacacacacacacacacacacacacacacacacacacacacacacagagccacatatgtacacagaatatttcagggtcagacaacgtgatatgtgactatagttccaatttatttgagaaggatacagggctgctacttgttttaggtcacatagggccatatagtgagatcaggtcagcctagattgaaaagtgagaccatcttaaaagaaaaaaacagatgagaagtagttcaaaaaaggagactgttcatggaaagagtttgagcagacaaagatgaaatgtggaccattgttactactgagtgataatatttgcatgcttcctttagtgcacatatataattgaaataatcaaacatgccttaagaatgataatagataaaacaaaaattcctcaaattagaactagaagtggttgctattaattaaataaccagaagaaagaagtacaggtagaaaagagtacaaaagaagtatatacactgaaccgtattttaaatgatggataattactgactatgtataatcatgggatttagtgtgatattgtagtacagacatgccagtgttctctgatcaaatctaaccccttttccctcacctttccacatgcttttccagcctctagtgatcttttagctgcgaataccttataaaggggagtgagtgaggagttattaaggataaaacatagggaaaaggtcgtgagctatttggtttctgaattcaagatctcatcttgaattccaattcaaatagaatgttaattactctgattccttgtgttaggaaaaattgtaaaaatacttatcttcttcttttgctggttgaaattgtcgataatgacaccaataaacaggttcagggtaaagaaggacccgaagatgatgaagatgacgaagtacaaatacatgtacaggctttcctcatacttaggctgtagttcaacctgccaacggagggaatttgttaactgataaagcagtttgaatactgggagcaagtcggtgcttctacacaagagtagaaggctatatatattcttagaaataatttagtgtattttattcccatatcaacagcctcaaagaaacaaaaaaccaaaaaccatccttgaaactaggaagcaaaaagtttttgtgtaaaaagtgatgcaattcgtcactctaacactaattgcataattttacatagtataactgacattctgttatttggataatagactttagatttggtaagttttaagttaattgattttcagtaatttgaaaatactagtgtggtgtcttatgtctgtgcaactccagaatttgggaagctgaggctggagacttgttgagtactattctagcctgggccacaatgcaacatcctgtctttaaaacaaccaaagaaaaagttagtgaaaaattagctcttataaatatagagaggacacttttatagtcaagattcacttgtgtatgaacttatatagcaaatgaaggaactgaagtattcatttggatgctggcatcttgccctaccagtaacaaagtcattaaaatttttggattgaatagacacgttcaatgatttattttataaaatcctccattgacgactgactctcagacttgcagttataaaaatagacacagggctgtcactcaatgcataacaatggagtcaatatttagtataaataggtaactactgcagtcttctatttttaaagacaacagctaaaattaactgaacatctaagacaaactctatgcaacaaggtgagatgatgcaattccagaggtgatcaagaagtttgtaggggaacaggacgatttcaaatttatcattgtctccatagtaagctagaggtctgggttaccgaagaaaaccaaaacaagaacaagaataaaaaaacaaaaacaaaaaacaaaaaacaaccaagtaacaggaaagaagaaaacagagattttacagttttggagatcaatcttagaggaagcctgtgatttttgagtacatctgaaagctaggaaaagtatggaatcaataaagtagaaatgataacagtgttggtacataggaaagctaggaaaagtatggaatcaataaagtagaagtgataacagtgttggtacatctgaaagctaagaaaagtatggaattaaaaagtagaagtgataacagtgttggtacacactccagtgaatgcatgggtgctgttcttataaaggatggatttagaaaagactatgacacatttctaagatgtttagcctgcatctttagcctttcaggcttcaaagcatggagcctgcctacacagttcagctactgaagacagtcatatattcttctatgtcctttatacaacaaatagaaacactttggagaatatctgttgcttattaaatgaaagagttgaattttttctttcattttttgacttccatttttttttctgaactcagtacaatatctctgatagacactgctgtgttaagtacaaactcaatatactgtcttcctattttttaattaactaaaatggagttagtttgtttggctaattcataagctaatttaagcaccaaatcaatatttccagaagacattggatataaaaaatacttacatttctggaatcaactgcagcatacatgatatccatccagcccttaaatgtggcctgttggaaaggacatgcatgccttaatttgggttaaatttcaaaactgatgcttactaatatccttactgtacatgtttaaagaaatattttaaactattttcaaaacaaactttccttggattttgaaaaaaagatagaaagccaacaaaatggcgatctgatataacttcctattttccaaccagctctaaagtaactctcaagcttaacattctattacaatttggaagaaagtcctagaaatgtaagtggacttggcagtgtctacagcaagaacaaattagatctgcgatattctgtgggaatctcgtcttctaggtgatcaagttgacagtatttaaggtttttctttatgcttacagtgtatggatcatatgggcataaagaaaaaacctgaagctattcttttaagaatttttcagaaataacactatattcattttctatggggtaacccctgaaaagattgtgtaaatataattaacaacataataaaagtgtgacaaaataggactgacacttgtcatttgcacattgatgagggattcctcctctaacctcttgcaggcatttgtcatgtgtcttagaacacaagtttgaggctacaggacctgaaatatatattccatagtcaatgaggaagcctcgcatatttttgtgatttatctttgtatttaaatcattgactcttggaaaatgtgggagtgtgaccagagactaatgtatcttagtcagaaaacggaaattcttttcacatcaaagagagagatgggtgatgtgtcagtggcttagaccaattatagaacctgtctatcacacacttcctacaggaacagaaaagtgatttgacctatttctatgaacttactcatcaacagagaggtgggcgaaatagtcaagtgtgaaatttttacttagtagcagaacatgtttgagagttctgtgcacttatctggattcacaaatttgtactaacagatgataatgctgaaaacatattataaagtttcttcctaacaaaataacagctgcaataatcactttgttattattctgagcaataaaaattttcagagaaaatagtgttcacttacaacttgaagcaaagaaagatacccaaatcctacattatcaaagtttactttcacatttttccaccgggcggtctcatttctttctattagttttaggcaatcagaatgattattgacttcgctgatctcaaatatgtcaccagttgtggtgttaacacagtggtagaatttgccagcaaacaaatttacgcccatgatgctgaaaattagccagaatataaggcaaaccagaagcacattcatgatggatggaattgctcctaacagggcattcacaaccacctaatacacaaatggagagaaagagaagtcagaatccttattgattaaaagcaaaaagacatccccctaggaatcattgatttattttctatcaagactacttatcctatctgtgtaagagcaaagcagaaataatcttaacataaaactcagtcttttttaaatattatgcttaggaaaagaaatataggcaatatgcaaagagatggagaaaagaaagaaatctaatataaaaaaggtgctaaaggaaaagcaaaatgggagaagttagctcctggatgaagacacatgtgtagtttattagaaaaaataaaaggaggagagagaagtaggaactcctaggcaagagattagctcataaaaaaaaatcccaaaacaaaacagtatctcaaagaatagaactaaaacatttgggcatgaattgattggaccaatatactttaaatataaattaaaattcagatgtataaatataaaactatttttaacatctaatatatttttggccttaattatccatgcattgctataactaatagtagtttttgcataagaagcaagacaatttagcatcatgtatttcagtagatcatcacatcgtttatttcaagctccagtcatgtcagttgtttcatttactgagtttaattcaataaacttatcttaaatgaaacactagagagatcattttctcaggaaaacaggaaaaagagggatgtcatacgtacttatcaactctgatgtgactgagtaaagtcctgtgctaaaatattttctccattttctaatgtcaaagatatttccctctctcttgtccttaattcgggactacagatttaaaatgggattttttttttttatatttgacatatggtagtcttggcttccttctctatagctcaccattgaactgcacattagtaactaagagggagataaaggctggccctaatgtgctcttaattggcaagtgtgtttcagacttgaacatggacgtcagattaattctactcatgttgggggagggggggcctgccacttttgttagtttaattatgaatatcatctctttgatttttattatagtataattttagaagtttttgcctgtctgacagaagtataagagccaattccttgtacttctgagccctggctgaactttgtaaggaacaatatccattggggaatacaaaatagtgggctatgtggccaagggaaatgaaaccagtaacaataaagatgagggatgaacatgaagaagataattcagagtgcgctatcaaggcagaagccaaagataggctgatgtgtagaaattaatgagcaactatctccctttatggcctccctaaaaaattagcacacaggctttcctgtatatattactttttaaagttattttcaatttaatttttaaattattaagaagagatttaaaaacattttaatgtaattttttaaaaaattgtacccctaaagttgtttattggatttgagatatgaacactgaaattgagtagttgtttctcatttctgaatacttcatctcccactcacagtgaggtgctctgtctgccgaggatatgaaatccatactaacatgcaagcttttcacttttaacactcatgacactgaacattttggtacaagtctgtaggtttcatgctgcttccttcaaacctttccaccttggccattggccctgttctctatcttcgctctgtcctcggttactaagaattacattcttatcagattttatttgcttgccttctttcagtatggatactaaatttatctatcccatgtcccattttgaaaaattccttaatggttctctagccattagaaaacatttctctttctttggcatttacatcactcgacagtttgtgaggttattttcctcaaaacagtttgcaactatgtttatttgtgtgtgcatgtgggcatgcatgcattttctatagcacttgggtggaggtcacaggaaaatttgcaggaattattcctctcctttccaccatgtggggtcagttctggggattgtgctcaggtgctagacttggctgctgaaggattctcacaagcctgatacatttcccctttcagcttccctaactggtgacatacacttcaccctcctctgtgacagtcactccacgctaaggtgttagtctgagaattgagagccttctttctttgaaactccctgccaagtacttgcccttgaaataatctccctcctccaggctttagctcaaatatacatgtcgtttattgagtctaactctacacatccttaacaaagatgagagtgtttgccttcgaattgaggaattataatttagtactggaaagagcaataaggacaatttggtgcttggggttcatttggaaaattagactaatgaaggtaaaacaagttaggttcagaaagtagaccagaattggcatctcatactcttttctgtttatcctgcaagttttttcaagagtttcaacctcttatggttttctctgactgctctgtgtgaaagttaaatattttcttatattccaattgttagattatgatgcttcaatgtgtcaagtgtacatatgtgtgcaagtgtgcatgcacatatgtgagcatatatgtggaagcatagagctgtatgggaaatacatgtatagatgtagaggaaagagatgtaggggtcggggggggggattctttcttatttattgcaccaactgaattcagagcttgaggacagggctagtttcatctttctagctctggaattacatgtaagctactatgcccatccgacatttctgagggttctggatatccaaattccagtcctcatacttgcctggctaaggatttaaccactgcataagaaagcagtttgcataatgtaataaatgggagagatttcctttgaagaagggactggttttgaattaaaagtaatgcccattagtgaattcaggatggcaaatactatataggaatgcagttcaggaaaacgtgcaaatttgccatagatttggcccagtgagacatttattttacaaggatgtttgtcttagagaacatttggcataggatcagaggatttgccactgaaaatccacttaaagttgcgatttcattaacatccagagcaaaagatcacaaacggattgcctctcccaagagcccaaccatcccttggttctacaatattaattctttgcagtctctagggagagtcagtaattggctcccatgtgggatgcgctgggaagtgttggtctaagtcaattggaaagaacacattgaggttataaggtacataaaaggagatgtctaagagagaagtatgcttaatgggtggattgtagaggttgtctcttctaacaatgttttaaaaggacatctcccagcagaatttctgtattgtcacacaaccagttcttcaagtctatttcttctttagggttcatactttttattaaatcagtgaaaaattaggaccaggcaaatattcttgttgatattagaaatttcagtgcatttgaaagtatcatctaagtgaagacatttagattagttttttaagtcaccggaaaccatgggttctatagcttttctaagaaatagagaaaaaccatatgtgaataagaatttaaaaaatggaaagtaaaaatcatgagttcttaatatgaaatataaaaaatttttagaaaagccaacaactaaatcagtgttgtgaaattttattaagataaatatttttgatagataaatgcctcaattatccaaacaatttttttttcttccaaacaataaaaattatctttcttatccaagactcctacattttaagaggaagcagaagtgtcagtttggctttttattttggggtgcactgtgatgccttctaagattctgggaagttaattggggtagcttacaaggagttggcttatacaccaatttcttagtgctcatgatttttttgtttttcatgcatatcctattctttatacttcaatgaagttgacttttcacatgttttggttttataacttaaagcacatctttttttttttttgtattcccttgtttcacagggatcttgccttgctactttctgcaaataacacatttttatgcaataaagatgagaatgatcataaccattggcaaccctgagatacctggcctgttgtacctttagccactgctcgcacacatcaacgatcaactgatggaatgtgactggcccattgagggaccagagcagtgtgttgaaaaaataaggactatatgctctgtcactaccatgagcttgacaaatgaaaacgttttcatcagcatcctacaccagggtcccccaccctcaccaattgagtaatttccccataaatggacaatgaagtataaatagctaaatcatattcagtgaaacgtaataaagatatgtacttctggggttataatccacagatggtaagtcagagataactttttttttcccaaaagaagtttaagctcattaaaagtagtggatttggaaataaatcctgtattgtccctactgtggtgcaattgtacccttcccactccctccctcaatcccactacacataagtcacagtgcaaggattaaaggtagcaaaaggggtaatacagtacccataataaagggctgaggggaggaaccaccgctccaccccatccaagttggagcaagattatcctatataaaatagaaatatatagtttattattagttagaaagctgatatgacagaacatttggtgttactttttgtatatgatgctcactgcctgtttccctagcaactaagacttgagttctttggaaaaggtttttacgattttcccagcttgggaaattaaaactacgaatttaaatacaagttttatttgaccctaggtattcacgacatcggttcattccgttcaatttcacaagttgaaaaaaaaatttggactggaaatttgaaatacaataaatgttcaaaagctgtcagccaaaagtgtgcataagacatgcaaaacacaaagggcaacgtgatgataactcgtttgttactttctaactccttctcaagcactatgcagcatgctgtgtttggtagtgttgcgtagaagcacatgctttgaaagagtgacaaaaaacccaaaacaaaatgactgcctggttgacactcggacacagcgattgcggttctatgctgccaaggaggataaagtgagagtttctgaagatactctagctcacttcccgcttacaatcatcatcatgcccaacctcgccgccatccacagttatatactcttacaaagtagaaaatgtctcatactagaaatacaaaaaccagaatcaacagaaggttggttttgacttcacaatgccaaactggtggtgaggaattgccgtgaccttgagatatttgtggtctcactatgtgccaagctgaccaaggagtcagcttcgtaatatctacccagaatttttgttttgatgactccagttttaaaaaagagaagcatatcaacaataattgacaaaagcattattaacaataattgataaagttatttctacacaaaaggaaaatagactcatttgttatggaaagtcaatattacatataaaaaataaacgactggatttaataatattctaaaagatcaaagttgaagtataatctaacaaccttatatacgtagcattattcattaaaggcctgacactattactgatgttatggtgtgctgcttgtaggcaggagcctagcatggctgtcctctgagcccctaacaacagctgacagagacagatgccaatatttacactcaaccattggactgaagtctggatacctgtggttgaattaggggaaggattgaagaagttgaaggggagggtaactccataggaagaccagcagtcccaactaacccagaccccagggagcttccagagactgagctaccaagcaggaacatacacaggctgggcagaagcagaggactgcctggcctggtctcagtgggagaagatgtgtataatccttgaggaacttgaagccctggggaagagggaggcctagtgagggagggagcatcctctcagaggcaagggggaggaggaatgagatgagaaactataggagggggacagggaggagaggtaatggctggattgttaaaaaatgcgaaagaaaaagaaacataaaaaaaccataaaaagttgaaaaatgtgaatttaaatttagctcatgtatttttatataaaatgtataaaaacaatgttttccttgacaactgaaattgctattctgaaacgaaagtgctcttttaattggaaaagcatttaagttttgcataattgggagaaaatttatgatacatttttaatacaaatgtgatttcttgtgtgagaatcaaagctcctttgtgcttacttggatctactgaagagaagttttcatatgtgctagagaaattaaaaattggacaggtttcttacagtatagtataataaaatttataataggtttttatggggggacacaggctgaaagccctctatgtggtgcagagaggagcctgtttgttggagccttggtttgtaagtgtcaggacaatgagcactctttgccttatacatttcatctgattggtttaaagagcgtaaattttggatcttaataaaaaaataattttcacacggcacatcttctataaatgattgtataatgctttgaaataatcatcataacaatgagccaataaatgcaaaaatctgatacgtgttgaattatggagaggggaataatgctttgctcaaaagagcaacataaaactctgtgtaactgagaaccgaggtttaagttaaggttgacgagccatgtatggcaatgaataaaaatacatgttctttttccttatcagctgtattgtcataagatgtgtatgtatttatagtaattaaattagtgtcttacttattcaatgtcattaatttagttacagttgaggcagtattattatactccagtcaatggttaatatctgcccttggatatattcaaataatgagaattttggcattgtaaagacaaaacatttaacaattcttcattttttcctttgtattcatacacatttgtgattcacattactttccataggatcccttaagtactgatgggctgtcatagaggagaacgatatgaaacaaaattatctctaggtaattattacatgactcaacttagttctttaagagagtatctgcccctccccctttgtattaggaattataaggaaactcccaagatcgattatgaactaaggtcattttaattagcaaagcagataaatgatattaaatcattttcaaagaggccgattttctcttgcatatcaccaagaagtaaatatgcaacagagaaaagggtaaagtagcaagtttgcaaagggttgccattccttttgcatgcacgtgtttttcgttagttaagttgaactcagcctagctttgacaatatacaacgctgcagagttttcctttttcttaccctcatcccttcaaatcgtgataaggctcttaggggtctcagagctcttagtgtccttagggatttgatggccccgagttcagagtaacccaaggcatttgctgttaaactgaccaatgaaacctgtacaatacaaataacaatgaatcaataacaccgctttcgtccaatttgcagttatcaactaatacaacagataaagttttattcatagctgttctgttattctactgaataaacacagcaatagtgactcctaatgatgaacggctttatccatagatcactgccccacctaaccctcgccagagaagctctctcttgcagtaggtgatggttaacagggacccacaactggacagtgctgagtgagagtccttggaaagctcagtactaaataggatatcttcatgaaacccctcctctcactccttagagagctatgtggaagaggaggctaaagagtttaagagcacttgttggcatccacaataatgtctgggtttggtagctgtatatgggatggatccccaggtggagcagtctctgggatgtcaacaagtgcttgctgacaggagcctgatatagctgtctcctgagaggctctgccagtgcctgacaaatacagaggtggatgctctcagccaaccattgggctgaacacagggtccctagtgaaggagttagagaaaggacccaagctgttgaaggggtttgcagcaccctaggaggaacaacaatatgagccaaccaggacccccagagctcccagggactaaaccactaaccaaagagaacacatggtggggactcatggctccagctgcatatgtagcagaggatggccttgtgggacgctgttcctatgaagcttctataccccagtgtaggggaatgccagggctaggaagctggagtgggtgggttggtaagcatggggagttgggaagggataaggggttttcagaggggaaacaaaaaaaaaggggataacatttgaaatgtaaataaaataactaataaaatttttttttaaaaaagtttaagagctagaggtggggagtgactccaagaaaattagtgtcttccagatacaacagggtgagggacatatgagctcacaatggtgacagacttgacggacaagacttgtggaaaatttaaactggactaaattgtagcgtgggggaggggaggtgagcaggaagtttttacccctaaccaagatgctatttgataatgctgggagagaaaaatcagttttcctcaagggagtgacactgggtatatgaaccacactcagggcagtctgcaagagcagaagtagctggtctacccaaatgttctcgaatttgatttttgtttgtgtgctcttattttgttgttattatggtttagtggttggttgttttcgttttttttttttttgttgttgtagttttttgtttgtttttgcttgtgttttattgcttatttttttattttcttttttcttccctttcctttcctttcctttcctttcctttcctttcctttcctttcctttcctttcctttcctttcctttcctttcctttcctttcctttcctttcctttccttccttcctctctctcttccttccttccttccttcgttcttcctttctgtctgtctgtctttctttttctttatttctcttttttccttccttccttccttccttccttccttctttctgtctttctgtctgtcttccttccttctttcttttctttctctctttctttctctctctctctctccctccctctctctctctctctctctctctctttctttctctttcttccttttctttttataaagagaatggagttgtcaggatatcaagacaggaggatctgggaggacttgggggaaggtaagcaatataatgcaaaatacaccgtagaaaaatttacactgtatgaaaagtttaaaagtaataaaatattaaaaggacataaatgaatatcaagagtaaagaatttgcaaaataccaagtcctaaccccacttggagttatgaaagcataagctaatgcctattgattaatttcctctctcttttctgtaaaactgatgactcctttgagatttccatcaatttgctcactccattttggcctcactgagtggccctgttacttgtttttaagtattcataactaaaattctccataactcactattctcaaattctcactattcataactaaaattctccataactcactattctcaaattctcactattcataactaaaattctccataaggatatttggtacatcaaggactctgtaaatctcatttacataaaagaaaatttcttcctcatcattaagtaggtttgttttcccctaccctctgtaaccttacttgtaatagacttaaaaatctctccgtaaaatcttccagtagataagaaagatttataagattacaatagtgctcaccatcccttctgtatcttgctattatttaccactggggaagaacatcaatgaataagtgcatgaagacccaatctggagtcggtcaagtttataacatggcagaatagacaccataccttttaaatgtctttttctatcatttgcattatatattaccaatatcattgtttaaatttggttttcctactagatcttatctcctctttttaaattagttagtaaattagtccagaacttgtaagttctatgctattattaggtgagagagtttagggctggggagcctatcttgtcatcacaacacagtggcccgagactcattcattggtttagaattgggatacaaacaagacaaactccctcaaacaaaaggcacgacatggaaaatacctacatcaacaattaagaagtctagccaacaccaggcattggtgaagtatgtttgatagccataggccacccatttgaggagcatctccaggatgaaaatgtaagtgaagactttgtcagcatactccagcatggttttgatcgtctttcgctgatcaatatatatatcctcaaaggcctagaaagaaaaggttacacattttagctttcaaacactactagaatcttacagctagctttttctgattatatatgcacatggtatttccttgggatggaagaacggggatacagtattgctattgctttgttactctctgagttttatccttataaaccagagagaaagatatactttagatagctactaaaaccagagaggggggaggtgtcttcatgacttcactcttcctgaagtgaaatggtaatttcctgagtcaattggctaagccaggatgtatttcttaatgtcacattccatgcagccatggcgtgtctctctctctctctctctctctctctctctctctctctctctctctctctctttgttattggatattttctttatttacatctcaaatgttatcccctttcccagttccccactcttggaaagcccctatcccatcccccatccccctgcatttgtaaggctttgacaggcctcataggagagagctatatcaggcttctttcagcaagcatttcttggcattcacaatagtgtctgggtttggtgactgtatatgggatgaattcccaggtaggacagactctggatggcctttccttcagtctctgctctatactttgtctccatatttgttcctatgagtattttgttcccctttctaagaaggaccaaagcacccacactttggtcttccttctttagtttcatgtggtctgtgaattgtatcttgggtatttggagcttttgggctaatatccacttctcagtgagtgcataccatgtgtgttcttttgtgattgggttaactcactcaggatgatattttctagtttcatccatttgcctaagaatttcataatttcattgtcttaatagctgactccattgtgtaaatgtaccacgttttctgtatccattccactttttgaccttagccattctgactggtatgaggtagaatctcagggctgttttgatttgcatttctcttatgattaaggatgttgaacacttttataggtgcttctcagccattctatattcctcagttgacaattctttctttagctctgtaccctgtttctttgtttctatgctgtgggtgtgactcagtggctagaacagttgtctacgtgagaccagtagcttgacttccagcaaaaaccaaatttctctcattattatgttttttttataggagagagattaaatcaataagtgatttatcaatatactgtccaattttattttactaagcagttaactgcttttttggggttttgttgataattctacttctttactttttctttcttttcttttgtttgtttgttttgtttgtttgtttgtttgttgtttgttttacaagacagggttactctgtataatagccctggctatcctcactttgtagagtaggctggggctctaactcacaaacatctgtctacctcttcctgatggaattaagggtgtgcaccaccacatctagctgataattttactttttggtacgtatagtatgacattacttaataggaatgtcatattacttttcaattagatccacctatgccttttcctaacataaacctcagctggtaatttacttctaatatatatttctttcaatgatgaaaagtcatttttgtctatgatatgcagatatgtagataatgatatgtagaagacagttattccatcaacaattttatagaaaaatatatacttgattttaaaacttgtaagtcattgtgttttaatcaggcaaacacttgtgcttatttatttatgtatatattctatcatttatctaaatctatatatcatctatctatctatctatctatctatctatctatctatctatctatctatctatagtttctctattatcaatctctccaaacattttattttatgacttcaatatatttttatatctaaaattctgtcaatatagttgtatatatgtaaacaattttcatctaaatttaaatagattctgatgaaattaacatgtttctataaacataatccagtctttaagtaatcacttaggtatggtgcccactacttagcattaccaatatcatttgtttcctgagtagcccaagaatagtgaacacacatgaaaagggacagagaagaggtccccaacgacctaccaagcttccacaaagagttcatcagaactcagaggatatataaccactataatagcactaacatgaactctgatgtgctcctcatagtcatgtttagttaagcaaagaggaatattcactttgtttataatgactaagcaaaagggacccgttttttttgatctgtttcatgataagcaaacatcgatgaatgattagaaatgtgtgtgcacacatagatgcaaacccagaaatgcagctagtcattaactatctggcaggaagataaaagggtgttgttattgaagactcattgataactaaggcaatgggaaacaaaggcttaaagagtgtgagattttcccagttgctactgaagcactttgggttaaggttcactcaccagggcaccactactcaggagaatcatgaacacaatgaaggtctcaaaccagttgtgttcaactattcggaagcacgtcctccgtaggttccaccactgtttccctcttccttcttccacgctgatttgacagcacttgaatctctggacacagcctgcaagcatacggttccaataggagtatgaaagatagctctaccacctccattatacattgcatcagcccagcttcatccctccaccaccagcgctattcctaatttgctttaacttttaaaaagtgtgtaatttataagcaatggcaaatcaatgaaaacatacagcatcttcatattttgccttttctctgacacaatgttgccttcaaagaaaactcattgtaaattacaaataacgacatgtagtttgccttttgtggttgttcttttctcatctctctctttttttttattttaattttaaaaatttctttaatccttttttatagtccagtatttatcccactcctggtctggccccttactgctcctcatcccatatttccctaccctagtatgtaagaggatgtgcccacccacaccccaccagacctccccactccctgggacctcaaatctctcaagggttaggtgcattttctctcactgaagctagaccaggaagtcctctgctgtatatgtgttgggggtctcatcagctggtgtatactgcctgttggtggctcagtgtctgaggcatcttgggagtccaggtcagttgagagtgctggtcttccatggggccaacctcctcctcagcttcttcctgcttttctctaattcaaccacgggagtccctggcttctgtgcactggttgggtgctagtatctgcatctgactttttatggtctgaaattaatgcatttggttggagctactctagaaaagggtttcaaaatgaaattaatacctggacagaaacctcctctcctaagtgtgtattcttgtggtgctcctgaaagggtgttcctggtttcctaagttgtctgagtttgctaacaggtgactttcctggacttgctttgatgtgtcttttacgtcctcacattgcttttatatactgaatctagcctgtgggcctcactctctacaaggtctattacatttaagccacccactttgggtgatcgacagttgaaaaggccgtactccgtatgaactgcaagcgatgtcacccgcatctttaccttcagtgaagcaagcttcgggctcaagggtttcttctggttcaatgacaggctgttcctctgcaggcgccccaatgtctactgtgcttccctctgaggagctactgctttcgttgagtttctgggcataaaatgatcataaaaagcaaattcttttaatttaattccccaatgaatgacataccaagaagggattatttttctcaaggtaaggtgctaatgtaaattgagagtaaaacgaagactcagaagaagagggaatgggaaaacctaactgttgattcctaccccaggaatttctgtgtgcagattgctgcgctgtgctgggatgtcacaaattgaccatcagcaacatgtagtgagggaactcctatcccatggattggggaaggagagagtgtcgtgacttgtaggaatggggagagagataagggaaatgaagctcggagaatctctacctgagaagaaaataaaaccattaagctagtctgtgtttaaacatttacatatgtttctctaatagtgtctcaattctgagaaattataacataatgctttaacttacacttcctgttagaacagaggatcagaattatttattataaatgtattcatatttttatatttcatatgccttttggagaaaaggtgttttacaataagttaaaaatacatcaataaacaaatagccttagactcttaattaaaggggttcattattggaaaatattttcgaacctaaagtgttgcagaaacagaccaataaatgcatggaaaagtcagtttccgctcaacaagtaacacactaatatcccacgtaaagctaattcaacagaaacagcgtttctcagactttggcagtagtcaccagacacatggtgctctttggatccttaggagtcaaagatggcaaaaacagcagaaaatatcaacttatcctgctgaccttcaaattgttgtaagagtaaatagtacacttggcaatttagtcaagttaagatacactgagcgccaacaatgtgctagaaacttggtgttcattggcaactataaaatccgtagccctattagatacttgaaataaaatacgatgtttttcaaacgatggatttatgtttaatctaaaagagatctcaccaactacccagtcaacacatatttttaaataataaactttaagcatcatgctaaaactactactactaattcgtatacatgaaacagttttctttgttccatcaaaggaagatggcttctacacctgggcctctatccagctgactgtctctcttccttttaaatttcttgttaaatagaaaattaaaggtcacaaggatctgcattgacatgaaagaccagtcatggttctgagtgtctgttttaaagattacctctgttattatacatagattcttcactggaagctagttttaagtttttaaataattatgactatagcacgtttacatattcatcatctggagaatttgctcctctgcacaggatacagcaacaggtagactttaaatctacactgcatttgctttgaatgattcaaccatttcttctgacttaaaaacatatccaaggataagtcatgcatttggccatataataagtgaagagactataataaatggctagtctgtgtgcttgagttacagtgcccattctgaggattcctgtgtctttcctcaacataactggaatctataattggctgtaatgtgctacaagaattatttcttatttcctaaaaaaaaccctgtgagtagaattttatcattatccagcattcttcttcttctcctcctcctcctcctcctcctcctcctcctccttcttcttcttcttcttcttcttcttctccttctcctcctcctcctcctcctcctccttctctctctctatatatatgtctgtctgtgtgtattctctttgtataataagtaaattgatttgagaagttaagagtccttaccaaaattcattaattactagaaatcccatcttcctccctctgaataaacttatgtgtgggcagggattcagataaactttattgtaaatagaaattttaacttgctgagcatgtaacagtgatctgttagatctctacagatattttgctctctgtcaagaatcacaatatcaggtaccattcagataaaacctaatcttcagtgatatcatttttcagtgtcaagtagaacaaaacgctctcaagcagcctttctacaacaatggcatttgctagtaagatactgcatatagctggttctacgtcttgccagccatatcatgtttttcacaatgaccactgttttcattgacgtgtgaagtactgacttcttattctacgtttaaaagattacttagttgatggaactaaatactatttttcttgttctaagaaaaaggagtctgaacaggtgagagggtgcgccacagaaccggatagcttctgggacaggcggaggcacagagccactgaggcagcatcctttgcgggcagcagacagccggccaccgtctggacaagaggacaggtgtccgcctggctcagaaggcagcctcagcctaaggagcagctgtcgccatcttggttccgggactccgcagaacctaggaaattagtctgaacaggtgagagggtgcgccacaaaaccggacagcttctgggacaggtggaggcacagagccactgaggcagcaccctttgcaggccgcagacagccggccaccgtccggaccagaggacaggtgtccgcctggctcggaaggcggcctcagcctcaggagcagtggtcgccatcttggttccaggactctgcagaacttaggaaattagtctgcacaggtgagagtctgcaccacagaagctgacagcttctgggacctgccaaagcaacacagcttctgagaaaggtcctgttttgggccttcttcttcggccaggaggaggtccaaacacaagatatctgcgcaccttccctgtaagagagcttgccagcagagagtgctctgagcactaaaactcagaggagagaatctgtctcccaggtctgctcatagacagtaacagaatcaccagaagaacaatctctaaacagagtcaactataactactaactccagagattaccagatggcgaaaggtaaacgtaggaatcttactaacaggacccaagaccactcaccatcatcagaacccagcactcccacttcgcccagtccagggcaccccaacacacccgaaaacctagacccagatttaaaagcatatctcatgatgatggtagaggacatcaagaaggactttaataactcacttaaagaaatacaggagaacactgctaaagagttacaagtccttaaagaaaaacaggaaaacacaatcaaacaggtagaagtctttacagaaaaagaggaaaaaacatacaaacaggtgatggaaatgaacaaaaccatactagacctaaaaagggaagtagacacaataaagaaactcaaagtgaggcaacactggagatagaaaccctaggaaagaaatctggaaccatagatttgagcatcagcaacagaatacaagagatggaagagagaatctcaggtgcagaagattccatagagaacatcggcacaacaatcaaagaaaatggtaaatgcaaaaagatcctaactcaaaatacccaggaaatccaggacacaatgagaagaccaaacctacggataataggagtggatgagaatgaagattttcaactcaaaggaccagcaaacatcttcaacaaaattattgaagaaaacttcccaaacctaaagaaagagatgcccatgaacatacaagaagcctacagaactccaaacagactggaccagagaagaaattcctcctgacacataataatcagaacatcaaattcactaaataaagatagaatactaaaagcagtaagggaaaaaagtcaagtaacatatataaaggcaagcctatcagaattacaccagatttttcaccagagactatgaaagccagaagagcctggacagatgttatacagacactaagaaaacacaaattccagcccaggctactatacccagccaaactctcaattaccatagatggagaaaccaaagtattccacgacaaaaccaaattcacacattatctctccacgaatccagcccttcaaaggataataacaggaaaaaaaaaaaaaaccaatacaagaacgggaacaatgccctagaaaaaacaagacgataatccctcaacaaacctaaaagaagacagccacaagaacagaatgccaactttaacaacaaaaataacaggaagcaacaattacttttccttaatatctcttaatatcaatggtctcaactctccaataaaaagacacagactaaaaaactggctacacaaacaagacccaacattttgctgcttacaggaaactcatctcagagaaaaagatagacactacctcagaatgaaaggctggaaaacaattttccaagcaaatggtatgaagaaacaagctggagtagccatcctaatatctgataagattgacttctaacccaaagtcaacaaaaaagacaaggaggggcacttcattctcatcaaaggtaaaatcctccaagaggaaatctcaattctgaatatctatgctccaaatacaagggcagccacattcattaaagaaactttagtaaagctcaaagcacacattgcacctcacacaataatagtgggagacttcaacacaccactttcaccaatggacagatcatggaaacagaaactaaacagggacacaagtgaaactaacagaagtgatgaaacaaatggatctgacagatatctacagaacattttatcctaaaacaaaaggatataccttcttctcagtacctcatggtaccttctccaaaattgaccacataataggtcacaaaacaggcctcaacagatgcaaacatattgaaattgtcccatgtatcctatcagatcaccatgcactaaggctgatcttcaataacaaaataaataatagaaagccaacattcacgtggaaactgaacaacacacttctcaatgataccttggtcaaggaaggaataaagaaagaaattagggacttcttagagttcaatgaaaatgaagccacttcatacccaaacttatgggacacaatgaaagcattcctaagaggaaaactcatagctctgagtgcctccaaaaagaaactagagagagcatacattagcagcttgacaacacacctaaaagctctagaacaaaaggaagcacattcacccaagaggagtagaaggcaggaaataatcaaactcaggggcgaaatcaaccaagtggaaacaagaagaactattcagagaatcaaccaatcgaggagctggttctttgagaaactcaacaagatagacaaacccttagccagactcactagagggtacagggaaagcattctaattaacaaaatcagaaatgaaaagggagacataacaacagatcctgaagaaatccaaaacaccatcagatccttctacaaaaggctatactcaacaaaactggagaacctggatgaaatggagaagtttctagacagataccaggtaccaaagttgaatcaagatcaggttaatgatctaaacagcccgatatcccccaaagaaatagaagcagtcattaatagtctcccaaccaaaaaaagcccaggaccagatgggtttagtgcagagttctatcagaccttcaaagaagatctaatcccagttcttcacaaactattccacaaaatagaaacagaaggtactctacccaactcattctatgaagccgcaattactctgatacctaaaccacaaaaagatcccacaaagatagagaacttcagaccaatatcccttatgaatattgatgcaaaaatcctcaataaagttcttgctaatcgaatccaagaacacatcaaaacaatcatccatcctgaccaagtaggtttcatcccagggatggagggatggttcaatatacagaaatccatcaacgtaatccagtatataaacaaactcaaagacaaaaaccacatgatcatctcgttagatgccgagaaagcatttgacaaaatccaacacccattcatgataaaagtcttggaaagatcaggaattcaaggcccatacctaaacatgataaaagcaatctacagcaatcccactaaaatcagggactagacaaggctgtctactctctccctacctattcaacattgtacttgaagtcctagccagagcaattagacaacaaaaggagatcaaggggatacaaattggaaaggaagaagtcaaaatatcactttttgcagatgatatgatagtatttataagtgaccctaaaaattccaccagagaactcctaagcctgataaacagcttcagtgaagtagctggatataaaattaactcaaacaagtcaatggcctttctctacacaaaggacaaactggctgagaaagaaattagggaaacaacacccttctcaatagccacaaataatataaaatacctaggcgtgactctaactaaggaagtgaaagatctctatgacaagaacttcaagtctctgaagaaagaaattaaagaagatctcagaagatggaaagatctcccatgctcatgcatcggcaggatcaatatagtaaaaatggctatcttgccaaaagcaatctacagattcaatgcaatccccatcaaaattccaactcaattcttcaacgaattaaaaagggcaatcggcagatccatctggaataacaaaaaacctaggatagcaaaaactcttctcaaggataaaagaacctctggtggaatcaccatgcctgacctaaagctttattacagcgcaattgtgatcaaaactgcatggtactggtatagagacagacaagtagaccaatggaacagaattgaagacccagagatgaacccacacacctatggtcacttgatctttgacaagggagctaaaaccatccagtggaaaaaagacagtattttcaacaaatggtgctggcacaactggctgttatcatgtagaagatttcgaattgatccagtactatctccttgtactaaggtcaaatctaagtggattaaggatctccacataaaaccagagacactgaaacttatagaggagaaagtagggaaaagcctcgaagatatgggtacaggggaaaaaatcctgaatagaacagcaatggcttgtgctgtaagatcgagaatcgataaatgggacctcataaaattgcaaagcttctgcaaggcaaaagacaccgtcaataagacaaaaagaccaccaacagattgggaaaggatctttacctatcccaaatcggacaggggttctaatatccaatatatataaagaactcaagaaggtagactccataaaatcaaataaccccattaaaaaatggggctcagaactgaacaaagatttctcacccgaggaataccgaatggcagagaagcacctgaaaaaatgttcaacatctttaatcatcagggaaatacaaatcaaaacaaccctgagattccacctcacaccagtcagaatggctaagatgaaaaattcaggtgacagcagatgctggcaaggatgtggagaaagaggaacactcctccattgttggtgggattgcaggcttgtacaaccactctggaaatcagtctggcggttcctcagaaaattggacatagtaataccggaagatccagcaatacctcttctgggcatatatccagaagatgccccaaccgataagaaggacacatgctccactatgttcatagcagccttatttataatagccagaagctggaaagaacccagatgcccctcaacagaggaatggatacaaaaaatgtggtacatttacacaatggagtactactcagctattaaaaagaatgaatttatgaaattcctagccaaatagatggacctggagggaatcatcttgagtgaggtaacccaatcacaaaggaactctcacaatatgtactcactgataagtggatattagcccagaaacttaggatacccaagatataagatataatttgctaaaaacattaaactcaagagaatgaagaccaaagtgtggacactttgccttcttagaataggaaacaaaacacccatggaaggagttacagagacaaagtttggaagtgtgatgaaaggatggaccatctagtgattgccatatccagagatccatcccatgatcagcttccaaatgctgacaccattgcatacactagcaagattttgctgaaaggacccagatatagctgtctcttgtgagactatgccatggcctagcaaacacagaagtggatgctcacagtcagctattgaatggaccacagggcccccaatggaggaactagagaaagcacccaaggaactaaagggaattgcaaccctataggtggaacaacaatatgaactaagcagtaccccggagctcttgtctctagctgcatatgtatcaaaagatggcctagtcggccatcactgcaaagagaggcccattggacttgcaaactttatatgccccagtacaggggaatgccagggccaaaaagggggagtgggtgggtaggggagtgggggggtatggggacttttggtatagcattggaaatgtaaatgagctaaatacctaataaaaaatggaaaaaaagaaaaaggcttatctgagaaatgcctggaatgaaaattgcaagaacccaaaaggcactatgttatcttttgacacattttcaaaatatcattttatgtagaaggcaaatagatatgcacttcaaaaaattcatttagactgtatttacattcatatttcacatgttgacttttttaggctacctacataaaattttcactcttccaaagtctttgtaaagaatatatgcagactgacagtttttccttgttatttttatattggcatcttaattcataaagatagtctgaggcttacattatttctattcaaactttattcttttgagttgtcgaaatatttctttctagtgaggatataatgggacagtaagacaaaaaaataaaaagacaacaaacactggtgtgtacaaactcaaccacctttactggaattttggttacataaaggcctaatctccttatttttaaatgcaattctgtcttctgacttatattttaccttcagtttaactgacctgaggtcagatagccatatacaatatctgctatcttgattttctaagctttactttgagttccgatatactgttcctttttgtaaacatctatggatacttgtggataatactaacattaaaaatactagtaatgggctacagatggttcagcggttaagagctctgacttctcttccagatgtcctgagttcaattccccgcatccacatggcagctctcaaccatctaaaactccagttccagaggttctgacgccctcatctgatcttgtgggaagaagatatgtaagtagtacacagatagacataaaagcaaatactcatgtgtgtgcatgtgtgtttgtgtgtgtttgcaagtcttattatatgaaataaaataaaggagtctcaatgtcgtcatttaatttgttacattttaatcatgagataaaacattgcttcagaactctaaaagcaaaggtatgcttattattatttatctcattgttaaaacaaaaagtaagtgcagttctttggttaagttatcactgctactcaaatagggaggaagctcaatagctctgagggaggggctcacctcaactttgcacacagacatgtttcatacaatattctaaagatcctaggtaacaatgcaacccagtgttgtcaaacaagtattttattattttaaaacttaatgaagtagactagttcctttttattcttaagttggtattaatttttgctttttaaagtatgtttcttagtgttttgaaattaataaaatatgttaaatccattttagcatttaatatgctattaatcaatcttcaatttattaattccctaatggactagttaattagaggctgggtatatttttccatataaaccgtctgatctgtgcaatccatatgtacttggcaggttatttatgaggtgagatgatcagttactaactgcgaccctgatggtaagagcattttcccttcaccgtggattcatgctcccttttttttccttttttttttttttttgcttttaaagatgttctctggtagagaaaatgaccttgaaaatgaaacaaaacaaaacagcaacagaacaagccacagcttggggtttctttggaaggaaccagtcaggtgtctctttcttctcagctttaactttaaacgtgagatgtctttattttgtgacctagtttattacagggatattattaatgtatattaatgaaagtttactttttatttttaagatttattattatatctaagtacactgtagctgtcttcagacacaccagaagagggcgtcagatctcattacggatggctgtgagccaccatgtggttgctggggtttgaactcaggacctttggaagagcagtcagtgctcttaccccctgagcccgaaagtttactttttaataagtgataaaaataattgggattttgtaactgatgggtcatatagtgcactgtcatatgtacagagagagagatgcaacaaagactagcacggaaggaacttatctataaatgaagcccatactcatctatgaacaaagcatgacgtgtttttaaccttagcctttcgctgacttgatacttttatacaaaaatatataaatgagattcctgatgctctgtttatcagttattattgtctcaaagggttaaaatacttggcaaagcagtttaaatggaagaacgttttcttttggctcatagtttctgagcaggcagtgcatgatggtggggagagagcatgttggtttagagcagtgcatgtcatggtgagcaagaaaaccaagaaagggaaagcagcctctgctggtagtcatcattgtcgtcatcttcgtcttcttcctcctcttcctcttctttctccccctcttcctcctccccctcctcctcttcctcctcttcctcctcttccttttcctcctcctcctccacctccttctcctcctcctactcctgctcctcctcctcctcttccttcttcttcttcttcttcttcttcttcttcttcttcttcttcttcttcttcttcttcttcttcttcttcttcttcttcttcttcttctccttcttcatttcttcttccccctctccttttattattcagtctgtgctcccagtccctgggtgggtgtcatttccatttaaacatagttttcttcttagttaaccctttatataaactccctaatagatgtactttggggtgcaccttacagttttctaggtggttctacatttagccaagtagacaatgcagattagccatcatactccatagcattaaatatatgaatgttaatatgttgttgtgtatattctgccttaggagatatttctaatgtatgcattaaaatcaaaatgatcactattaatgactctcaacaaagcaacactgtcatatcaaagaaaaagacactattgagacagtagttcttataaagcagcagggaagctcaaacaccagcccttagtgccccatatcatcagtttccctaatgtcggtctctactaccctaacttctcaatataaagacaggtggtattctccatacaccctgtttgggtactagcacaataggcaaattgcattgacacaatctattctaatatactaaaatttaaaaaaaatggggtaacatattggcttttaaactctaactgggcgatggcttgtaatttagaaacattacatctctaatgtttatactattgtaatatccatgatttttaaatcagcagatttctgagctacaagagcatgggaaaagaatggctatgggctctaggggttctgtggacaatcagtgatgaagatgtcagtgctctttctattcctgattaatgcaaacagaagctgtacaaatgcgaatcatgttaattttcagtggaaagataattttatggatactttttacaatacaattgcttatcagtaatattcagtacataataagtagctgctactattattcagccaatattaaatgtacgcctatagattcaaggacttaagatgaggagattcaaactagaacgaattttggaaatttatcttgtcagaaatttagaatgatgtgtttaaataagatgttttgttgatatttttacttttagatgtgatcttatatgtttcaggcttccctgaagctcactatctagctgagacgttgagttcctgatctttctgactttacctgcccaatgatgggcttttagtcattaggtaccatgctcaacaaacatttatttcacagttgacatctaccatttatttcctagaaaacaccaggtactaagtaaacattttaaataagacaatgttcacatagtagtccttaagacattcagtaagttaaaaaaaaaagtccatcttcctcccacactaaatccatctcattggagttagtagtttccccactgtctcacttctgtgttattttgctttctcttctttcacgagaagaccccaaaatatctcaatgcagccactgctagttttaatatcagttcctacttctaaaagtgggaattccaatatgacaccaaagtttttataaaagcttgaatcatcattaaatagacatattcaacaacctaatatcatgtcatgtgtctatgctttctgctctaggaactaccaaccaaaacacaccattgtttcccttgcttatggttgatataccagtcgatttttaataggaatagagtatctttgaatagagtgtctttaaagtatttagattactcaagctctaaatatgctttgttatctttgagacttccatgcaatagcattatatcacagaaatcccactgtaagatgaaaatgtagttagagaaaaaaaaaccattcaggacacacaaaccactgaacaccatagctagcaatatacacaggaatgtgttggttgttcagaaatagtaacggtaagttagcccaagttagagacagtcctaatatccacaaatgttttagctttaatattttcaagtaggacctcatggactgaattacattcccctacccattcttctatcctaaattcaattgctgaaactgagagtctctaaatatctgaaggtctggcttgataatgagctctacttatctaatgactccaagattctcatccaatagagtaattcccttacaagttgaggaagagacaagagatccatttctgttcagtgcacctatcagtcaggccttgtaaagacatagtgagaaggtggacatctacaaccttagcaaatagtcctccccagacactgaccctgcagtaccatggtcttgaaatgtctgctttccagattgtgaataaatttttttttttgtgtgtgtgtaagccatctatttcttagcaccatgctattttatgacattatgtaattttaatgtgacaattggtagggagcactttttttctgaagttcactcagttatttaaactgagatgacacacacaaaaatattaaaacttaaagacaaaggcttcaggttcaaagtggggttccacccctcacaggttacatgctcttagccagccaaagctggttgtttttttcttttgttttgttttgttttgttttttcacttgaaactttacagtaatatgttcctttctgttcattacaaggattaagtaactaatgatgctagtttttaattcattatttgtacccatttaacaaacagattttaagaatgagaaaactcatacaacagtatattacattttgctttggcattcatctccctgagaaaagatttttggaatctcaataaaataatatttgatattatatcaaaaaggttctatagaatcattaatacagaaagtataatccatacatatatttatacatatacatctccccaatttacagcatcttacctctttgctttcttctagatctgattcactgctaaagtcttctgtgtttaagttctcaaagtcagactctcccacagcaatgggcacagtcacagtgaggctggggttgtttatgaatgacatataatcactctcatcaatgatgtacttctccacactgctgcccgtccctatgccacttgtggttccattcacatctttcagacagtccagatctttcccaatttctgttgtgtggttagagatacaattgtcttttctgttgtttagatcatcaagtggcttaatttcatctagaatcttctgtttcttaacaaaggattgttgaatgaattcatatatttttctttttacataagctattcctttgtgcatcctgtccacagcaatctgcaggttgttcatctcattgtcatcatcagtggctgcaaggttgtctgcactaaatgagctcagaagcaaggccagaaagaggttcaagaccttgaaaacagacataagtatgtgttcaccacaacacagaggacataggatggcttattcctttagctatagaatgaataaccgaatgctatatgagcaagatacagcacaggcattgctagaagttaagtgggccaagaccagaaaacatgaggccctgggttcaacactccgccctagaaaagttttgagcactctgaatttgtgatattgctccatctctatgtacatgaggcattctttctactgctctcaagatctcccatacatgaaatgaagaacttgaatgaattagtttatcattatatttaatattatatgagtaaaagaagatatatttactgagatactttaacaattccaaatttaaaaatgattaatatttgcaattatttatttaaatgtattttgggttttctctcttcatgattttgtgttgttggatgataactgaaaaaaatcatagtcatgaccaaatttagaatgaaagtcttcaacatatgcatggaccattcttgttagcactattctatagcaaaaattgccccctttctccctcacatgcacacgcacacatagacatcacacacaaacacacgcacataacatatttgtgtaaatttttaacagtcctatgcaatttaataactaaatgcaatgaagtgactgaataaaatagagttgagaagccaggtggcacaatcactttaatccaagtacttgggatggagaggcaggtggatctctgagttcaagcccagctagatctacagagcaagttccaggacagccagggatacagaaagaaaccttgtcttaaaaaaatagagctgtaaaatatggatttgagagtaaaatatcataggtaatattaatgtgcatacatttgttttaagatgtatttctatattaccatagtagattgtgatactatactttgccatgttgcggtatatttttagaataagaagataaacatatcttaagatcagaggcatttaaaattatttatcatgaaagtcattttttaataaattgggcacaaatttgttatgttattgatgtatttctgaaatgcatatctaacttgggtacataccacaaggttcccaatcaccatgaccatcatgaagacagtaaggcacatagcttgtcctgccacctccatgcagtcccacatggtctctatccactccccacacagcacgcggaacacgatcaggaacgagtggaagaagtcgttcatgtgccaacgtgggagtttgcagtcagtggcaattttgcagacacaatctttgtaactttttccaaacagctgcatgccaaccacggcaaaaataaagacaatgatggccaacaccagagtcaggttgcccagtgctcccaccgagttaccaatgatcttaatgagcatattcagtgtgggccaagactttgccaacttgaacactcggagctagaaaatgagaacaaattaatatacattattatgatcttcacaagcattaattatcttgagacttactaaagaataaggggctgcagctcagagacagaacacctccttagtgggcatgcagccatgagatccgttgctagcactacacacccctaaaaaattctgcttacattatcttgctctaactttctcaggttcatagttaatatttagaccctcataggaagaatctagcttttccagattttaataatgtggctcatcttctctgaaagtgatttcctagttgcatattagaaactatattctttaatttgtttctctgagaccatcttccaagttttatagtgtcatattgatatctgaatgtgaataatttctgccaaaggattcatttgtcaaaaaggttctaagtaacattgcattgagagcattgatgaaaataaaatgaaaaatatttattatctattaatattataacagaggaaaaatataaataaatgcaatgtattgttaaacctggattatttgctatgactcttcctcaatcttcagggaatttgtatgaatctatctatctatctatctatctatctatctatctatctatctatccttaatagacctgcaaacttttgtttttatggaacatattttttagaagtagaattacatgcatacattttatgtgaatatcgaagagttatttacattttcaacatttattaagttattaaccatttctattaaacacacttcttcaggttgaaagtattaattgtccaagtcattagaaagaacacattatcaacacagcaatagaaaaagatatcagtgttcacgtgacggggctagtgacagctcaaggctctgggttatgtaacccagcactgcaaacttataaatgataatattagaaagtttacataaataggcttttcagaagaaagttgcctttgtaaaaaaatatacaaatattacctgagagatattattccccatttagaggtatcagcctacacaaaaacttaaaatgataatagttttgtggaaaagtatagggaagcactatgagagaacaccactggggaaaacagttattattgcagttgtcttgtttaccagtcgaaatgaacggagaactgacaatccttccacattggcaaggccaagttctaccaggctgagtgtcacaatgaaaccatcaaagatattccagccttcttggaagtaatagtaaggatccattgcgatgattttcaggaacatttctgctgtgaaaatcccagtgaagacctaaaagcaaaaccatattatttaaattatcttagatagtgataacatcaaagataatattatatatatatatgtatatacatatatatatatatatatatatatatatatatatatatatatatatatatataaaagactaatgctacttctacttttccattattgatcctaagattatcctacaagtttatttgacaatgctggtttatattagtttactgttttatgctcatagaagctccaataaccagatagtgtaaatgctgtaactattttattacagatgaagagaacaatatttcaaggtatataaaatgcccatctattattaaccaacttccagacctcatgtcacctagacaagattttgccccaaaacattttatttgtaagtttatctttattcccttcaaatcatgtgtatcttatattattctcatcactatcattaatattagtcacatgcactaaaagtgcgtttccagaatctaaatagtagagatttaaaaatataaatccactatagcatatgcatatttacattgtctttatcagcaagatactaaacattctcctagatattatatagaatgcatgttatactttagatagttctttcttcaaataaaaacctgagacttttaagttgagtctgctggaaaatattttaacaatttatgcttcaaagtaaaaaatggagaatattgtcgaaactttcactaaaaatgggcttactaatcatatgatgtacaaaatgcactaggtactgtcaatatttcatgatatgaatctagaacagaacttagactcccttgaccctggaaggaaaaaagatggagacacttttgtgttatcattctttgaaagagcatataaggaagagaactcatgaccttatttgaaccatctggagctaggacagagtgatcttatcatttaaagaagaacatggccttagattctgaaagaacaccattactgactttttaaattattattacaggtctatgttctatttctcagtttttgcacagacattaaaggccattatttggcaaaaggtagtgtgtacccgtctggatattattgccttagggatgcaggaattgtggttgaaagaggtctaataaactattgaagataataaacagtttcttaagcagaaaatttgaagaccaagctcatttatttaccttcttgcacacttaccaagtttcccactgtaagaacatggttgaaatgttcagtcatggggtagtgctccatagccatgaagagcgtatttaacacaatgcagatggtaatggccagatcaacaaatgggtccatcaccaccaggttgacaatatgtttaactttcagccaatatggagaacagtcccaaattaagaatatgttggaaaatttataccaacagggtggacatttctgcctggattcttctagttctagatttaaaaaaaaaatagaagaaacaataaccaattatttgaaccatctagagctaggacacagtgattctatcatttaaagaagatcatggccttagattctgaaagaacaccattactgacttacaaatttacaaatttattttagatccactaaacatgctctcagtagcaaacatatttctctttgctgcaaagataattacttgataaaatggtacagtatcattagtcatgtacatagagataggaaagaaaactttttgttttgtttttgcatagacagtgttgcttaacacttggcctctattacagtggttgggcatatagacaaaggttccatggaaacatagcctggaactattcactctgtgtaaaatttcttgttactgataggctacacaattttaagatttaggacaaggattaatgtaatatataaagaaatcattctttatgctttgattttgtgaaagtgacttattcttttctccagtcttaaaattatttcagatcataatgtaaggggccatgctgctgaagtttgaagcacattacaacaaaggatttgtgactaatggattagaaacctctagctgttcccacatacttattaagacattaaaagttcagaagtttagaacattgaatttagtatgtaatactttcagaatacatcaccagccatttgctagtaggactgttccttttacttttgttcatagagtgtacttgccaacacataagtagagagagttgactccaacaagatattgcaagatggctgaactgagggaggtagggtttgttaccaaccttctactgtatttgttaagatgctggctatgctcattgccctttgcctctgggaaggatcttctagaaagtccatggaaacatggaaagagctcgacctcctctttctcatctcagtttcagtggttgttccctgcaaagcaaatgctaaggcattacatgactagcttgagcaatacagcacagaaataaatggagacagtgattttcatgaaagacatgcgtcatgcgtcttcatctttgatggccaatggcagatactggtgacttattggatcattaacctggaatattcaaacagttaaccatgtagtcataaaggaaaatataaaattttgacccctccttgattttatactcttatgaaataggatgcgatcaaaatatagttagtaaagctttgcataggcatttatagcttgttttcaattaatgaacatactgtcaaatcttaatgccttaaaatcttatatatggtcaggccatttttcactttcgagaaagtagctgtttaattttaagaaaataccgaagaccataacacacttagctgtcatctcaatttctaagcataagacatatactcatttattataaagtatatgctgatccatgcatgtgatgcaggggcaacagtttcatccaggataccaaagcaataagtcatctgatttacaccgagtcatgcctcgtcatgctgatatatttccaattattttatctggattaataatttattggtgtctctgtgtagattgttttgtgaatacctatatcagcatttctttcttagtgagataaatatgatccttagaaaatgtaggtaatgatgaagctatctaagcacagtgtttttgaaaatctgaactaaagcccagataaactgtaagagtttagtgggaagatttactatacaccctttacactaaaaagtcattcatttaatcttacaataatagggcactaggggtgatgtcttcatatgtaaattcggtatgggtacatagcaaatcatccaaggaagtaattattgttcaattaatccttagcatatacagtaggtaatgcattcaggtttgtgcaaggagtgccgaggcgctaacatttagctggttagtctattaaaggtgctacaagatgcaggtgcattctcagctcgaccaaccaggaatcattctcaagagttccattctgtagaaacactggctggtgcagcaatcataggccagccatgcctgaactatgtaaaactttcttacattgtcatcagtagctggcttatctattatcacctctggcagaagctgtccaactggcgatgtgggaactgagggtccaccaaccaaggaaaccacaccattgcaatccaccgtgctgtgcatcttcccattggctggaaacaccgccagcattcgggaggacctgctggtctggctcaggttactgttgcgtcgctctccgtgtcttcggggaacgaacagtgagtctctacggctctcattatcctcaaaggtgctgtgttcatcatcagcaaagtcattctcagaccccacatccttggctcgccctctaaagctgaaaagacttgttctgctattgcgtcttggggagaacagggaaccacgaatgcttaacagagactgaaagtttgaaacacatgacaaaaagtaaaattacattagaactgcctgttgaaatagttttgcaagtttaagttgaagaatattgcattgttattttagagagggtagcacattccttctgattaatataatttattggcattcagatgagattaaattagttctatacagtatggcttccagccattgatattaaataacagatagctggagtgcagcctaaaagtaatgggagaaaaaaaaatacccagccaccacgtctcaaatttaaacagagacatccttaaaaatctctctatgtatgtatccacctacaatgaacatgggcagcaagacagcaacggtttttaatttctctctccttttggataattccaacaatagttttcacagactattttagttcagtttcctaaaaccatgttatttatttttttgacacagctgtaaaacagattacttgtagaaccagaaagtaaaaatttcgaaattctgaatgatgcacttttctataaagtttatcatggctaatatttttaaagttcatgggataattgataaagaagttatgggatgacaaccaacatggtgccttaaattaaccaaaggtacatttctgagtagctaacccctagtctacattttgttgatgtggttagaatagctgcaagattaaatgtcattacaattaccagaaggcacatttaacatgaaaagccagttctcctgtcttccaatcctgtgttatttcaaaagcacctaagagtggatttgcatatatgtggatgggaagtaaaactttcacataactacatagaggggaaaaaacagttttaagtgtaatgcaacagtagtcaattcggttgatgaaaacccatccatctatttaaattctctctcagatggctcactctcatcggtgtatccaagaactctgcagtgcgtacctgatgcggggaagagtacctcttttcatatgtcagtctattcccttctatggagaagcgaaaccccttcctcctgatgctgtcttcagactcagacttgtggaattcatcatcatctttctcttctcctccagactgctctttctgtttcctttttttcctccgatttcgtctttctttagcactcttcgaactcaacttagaggcttctgaagagctatctgagagcctgcctgctgcactgggctccctggaatgttctgaggctgttgtagccgctgcctgctatatagaggagaaaccaattcagtgtgttgcaagaaacgactgcattaaatctttaagatgctcaagtttggtgtgtcatgtccaaaatgcaagctaactgaaaccaacatctagatgatgttttccaggtatgaagggaagtttttttttctttttaactaataatgaattttaaaaataatctacttttctccatggtaacatttattaactttgtctgatgccgcagagattcgtaagattcattggcagtcaagaataactcaagattctattcaaagctggtaatgaggtagtgagcaggggtcctctcaggtttccatgcttatcaaagtgttcaatatcttccacatagtatcaacatatgtggagatgttccacataatcagcgttatgaaacatatcacagtttcttcctcactctcccctgatacagttatctatagaaaggagagagttgagagctttctgctaagcaagttaaaagatgttcagttctctaaaagccatcccaactatcttcatatcaatgttggctcttactagttatggggtaagatgctgtgtggtcacagcttgttctgttatgaagaagttagaacttcttagtcaacattcttcccacaattcccttaatctagaactgtagcagataaattagcatgcttgaagtaactcttttttttttttatggtcaagatggttacaaataaatttgatttaaatagtttaattagtctttttgaaaatacacataatgaattcgtatgtcccatttagaaaccacaaggaaacgtgggcaattggattcatttttttttttttcattcagtgagtcaggtacactgacaagccatggaaaggtcaagtaaacctcttgtagtactccatattgctaatgatgcttctttgcctagtggatggttttgaccaagagaacattttattaaaaggaaattgaacaaccccacctaaagacattgtatttctgaataaagaaaataataaattactttaatgaaatggccaaatgggttttatatgtcaactaatgaatttgcttgtcagaaaagattgttgtcttatgatactttttctaatgctagtatatttgagtaaaagattttaaacttgggggggggcaaaaaagcccaaagttactatttctcttttcttcttgattctatttaaagtgataaaaataacataagaagcatcttctgtagctagtgtaaaacagctctgtacaacttagtgatgtgactaggccaattcaaactaaaaagatgacccatacatagaagtccttggagtttgatgtgctcagctttctcacatcctgtcagatgactctgccttttgtttcattacagctctttgtaacatggcagtgaaagaggtgacaccagaagactagagaaatgaaggtcggagataagacctacttgaactgctgagtacctgtgcagcctcttgctgcttcttaagttgctccaacatctgctgaaattctgcctctttctgttcagcctcctccagtgtggcctgattctgctcctcataggccatggccaccacagccaggatcaagtttatcaggtagaatgagcccaagaaaatgaccagcacaaaaaatatcatgtaggttttgccagcagcacgcaatgtctagaaacaagaatatgagaattatttttacaattatgtcggtattgggtgacttcacattttaacttacttgtgtatgtggcagaactctgacaaaattaacattgtgtcccatcagtatttctttaacctctatctcttctttcttctttaagataagcattcatagtcataataagggattcttggattcaccaggaataacagttgatagaaagcaatggggaccaccatgaaaaagctgagcctttcatggaaattaaagagaccaatggaaaaggtaatacttgagcagaggacagggcagagggaagacttggcttttgcttaggagaaattgtatctaagaggaatgagaaatagaattcaaggcatggagaaacagaacagaattactctccttggcgttactccatttaatgcgtattgtaatcaatgggttagaggagtccgagtcattctttctctactgtatcatgctgcgggttgtgtttcatgactcagtttgtgttcttacacgcttttacttaaattttcagattctcaccagttggtatagattttcccagaagtcctgagtcatcagtcgaaacagggacaaaaatgcccaactgaaggtatcaaagcttgtgtaaccataattagggtttctaccagcttttacacacatatatccttctggacattggctgcaaatggggaaaaagaaagtatgacaagacattctgctgtcttcttactctggtagaagcctacacttacaaaataatctagtcactacttaaaggacacaggcgtgtggaatccgaattgctgatacatttcccacctttgactccatagtatctatcttattagctgcaaggtattgatattgcttagtaaccttttcccctcactgtgaagtctccaaaggtgattcatagctttatacgtacaccaagaaaatagcattacagatcaaagtgttgcttcttgctttacagatgaaactttaatatttagataatttcttgttttatttatatcatagttactgacaattagtatgcataaagttagttgctgttatcagtcaatttctagagccaaagatacacacagacacatccatatacaaacatatgtatggggacatactacacatacatctcacacgcgtgatcagcttaccctgcatcagagctatttccacacagcagtgcatctaaaacaccctccaggaaataatgatatcctgtttgaaaaaaagagaaagccacatgatacacacttgcattgtgaaacacattaaaagaagagtaggaaagtcaggtcttactttttggttcactaagtgagtttacaagtatcttatcatccacttaaacacatgagttttttccttttcttccttcaaattctgttattaaattaaaggtatcgataatcaactgtacgaggtttttttcttttcattattagtggaatgttagtgacaaccatgggtacttagggaacatttatgaaaaggtatcagtattttctactacttttgtaaaataaagaaaaagttcatcatccaaagaagatgacaatgatgggtatctcaaaaataactacatatttcaaaagaaaaaaatgatatattttcttgttctattttcatattttcaatccctgttaaaactttcaaattaattataacttacatttttcagttcgtagtatatatgtcaattgacacaaattgtatcaactatctgaatattttaatgaaatgaaatattttagaattgaatataaaacaaataatatttcttacaaattaatgaaaaatgtagaacatcttaaatattaaagttaaaacaattagagtaggcgaacatcaaatcttatcagttctccctagttctcaagagttcacatctttcattactagaggagccatgtctgcaagactttccttggccatccatttcctttccatcaaagattgacaaggaagaaacaacctcaggttgtgtccagtaggttgtatgctcacacagtatcctcagaaaaaccattatcccattgcaactactcattcaaaaagtattagcgccgggcgtggtggcgcacacctttaatcccagcactcgggaggcagaggcaggcggatttctgagttcgaggccagcctggtctacaaagtgagttccaggacagccagggctatacagagaaaccctgtctcgaaaaaccaaaaaaaaaaaaaaaaaaaaaaaaaaaaaaaaaaagaaaaaaaagtattagcagtattagaaataaagcgacgttcattatccccctataacttagttgggattttgtatcctttcaagaagtgaaatgagtagataggaacaacagaaaaaagagaatggaaacaggccacctcaggaggtaggaggtggggtgaccctctagaatgtaccagagaccaggaaggtgagagacgctcagggggagggaccttaggtgaaatgcccaaccgtgggtagaaggaacttgtagagcccacctccagtagaaagacaggacatcaagtggagggatggggttgccatcccaaagtcaaaaactctgacccagaattgttcctgtctaaaagaactgcaggaactaaaatggagaagagactgagggaaaggacgtccagtgccagcctaattagggatccagcccaaggggagactccaaggcctgatactattactgatgatatggtgtgcttatggacaggagcctagcatggctgcaatctgagagccccaacaagcagctgaaagagtcagatgcagatacacccaaccaatggacagaagccaggaactcctgcagttgaattagggaaaggctggaagaagctgaggaggatgaccaccccataggaagaccagcagtctcaactaacctggatccccgagacctctcagacactgagccaccaaccaggcagcatgtaccagctgatatgaggcccctgacacatatacagcagaagactgccaggtctgggttcagtcagagaagataaacttaacccttgagagacttgagatcccagggagtggggaggtttggtggggtggggtgtgggcggggtgtagggacatcctcttggaaatggggtaggagggaggaggtatgggatgaggactagtcagagggcagactggaagtgggataatgactgaaagattaaagtaaagaaagattaaagaataataaaagaaataaggtgtgtaaatattttcaaaatttacatcagataattttctaagtgactacaacatccttgtgatcatgtttagtctgtgactagacaggaagcaggcagactatgaaaggataagtacacatattgatggttcttacttgagtcttgaatgtatgatttccagtcaaactcgaacacggtttcatttacaagtgtgccattgtaatccatagttatattcttctctatgctatgttcctcaagggaagcgttggtgggaggccactgtacacatttattcctcaggttgcccatgaagagctgcaacccgatgagtgcgaacacactgagacagaacacagtgagtatcatgacgtcagacagcttcttcaccgactggatcagggcccccacgatggtcttcaggcctgagagaaagaagtgtatcaagcatctgaaatattaaataagtccttcacacaagtctctcggagacactaaataaacgtgtaagtcccaaaatgtggcccatggcagggacattgtcctataaaaagttcgagagtgtagcttcatttaagaacatagcattcatgctgttgtaggttattctttaagtcttataattggtcttttgttagcaaagaatgggattgtttttgcataggcatcaatgggtataatgaataaaaatgaaaaatttatacatataatagggaacaaattctttataacattgacattacaaaaatactttttttttctcgagacagggtttctctgtgtagccctggctgtcttgaaactcactctgtagaccaggctggcctcgaactcagaaatccgcctgcctctgcctcccaagtgctggaattaaaggtgtataccaccactgtccggcacaaaaatacattatatagtaaaagttggttgggttgaatatcagagtgtccacaaattaaacacaaaggttgataaaacctccagagagagtaatcttataggaagtactcagtcttatgattctcagctttctgtaatgatgaatggcaagcaaggaggctcagttgaaaaagtctcagagttaactcactgattaacctacatgctttcatatagctctcacctggaatgactgaaatagttttcaatgctcgaagaactctgaatgttctcaatgctgagacattgcccaggtccacaaactccgtcacatatctgtaatgaggagttcacacacagacacaataacaggaagcaaagaaagttttgtaggtacaattaccttatgctttatagtaattgcttctaattagaaatgtgggaatggtctttagactcaatcctctaaatgtgtgaatagctaaaaattacctaggtatacaaactttgttacttacctgtaaatgatttaagattgaaaagacactagcatttatctgatattttatgaagatctttgctgcttttaaatagtgtaagttgcaaattaaaatttagacttcatcaatgtagtcttatttttcatgataaataccacaactaaatgtaaatttcataaaatatacaatcttgatgccatttggtaggcaaggtagaaacactatatgtgaattgggaaaattaactaaattaattagttaactggaaccaaatccacaggctagggtttcagctagaaaagaaatgatataggaaatcatccaacagaactatcgattataaaagattgcctcttgccccactattcaagactcgcatttcctaaaataacgtttgaatagaagttgaacaaataaattaacaatagcatcttacatggcccaaggccactctgtcatcacttctattttagtctcaagagtgagaagtctcaaatactgtcctgaaagttgtggctgaaacgcatgggaacctttcatattccaatcagacataaagttatacagttaaggtcagacatccaggatttgcactttggagccgatcagtaccatctcctgtcctgtgtatcccttcactcctgctgatgcccagaaagtcagctacccagatgggataagtggtattaatccactgtcctccatacctacttttgactattcttgaatagctacctattattctcatctcttcctggtgtggaggggcgtgatttatcactagcaaaagggagaagacaggaaagtagggactgaatatacaactcagtgtatattgaaaagctttgtgttgagtaaaataaagaagagcctaaaaacaagagagggagggagggagggagggagagggagggagggagggagggagggagggagggagggagggagagagagagagagagagagcgagagagagagagagagagagagagagagagagagagagagagagagagagagagagagagaggaatacaaattgaatcagaagggaaatagaggcaaggtatgtctgctcaagaaataaccatttatttgatttatgatgtatcaaatgtctttttcaccttaggatcttatttccagcatggctacaatctttctactattctataaaggtaacaaaagaagccacggggtgaggcacaacaggactatcagtgaaaagttcagtgcaagtttgtgggaccagtgcaaattttgctgtgtgaactttcaaaaccatcctccagctcaggagataaataagttatgcttcagtattacaagtatttgtgtgaggagaccagaatatacaatattttctttctttttggggggtagggggtgagacaggatttctctctatagccctggctgtcctggaactcactctgtaaagcaggctgaccttgaacttagaaattcacctgcctctgtctcctgagtgctgggattaaaggtgttcgccacacctgcctggctacaaaattttctgatgttttaagtgttattaaaattgctattactattctcatggagcagtggaatgggtttacccttttgaggtaaatgttaagacacggagttcaggtgcccaaatcatgccaggatgttttaccactcgagcatgttgtttaaaaacctgagcatagacagcaaaccaaactgtattctctcaggtttccaaaagagaaggcacttacgcgaatgtaatgacagtgaagtccagccagttccatgggtcgcgaaggaaagtaaaatcttctaaacagaagccccttgcaataatttttattagtgattcaaaagtatatattcctgtgaaggtgtacctagaaacaagtagccaaatcaattaaggactttgtaatttcattcagagtacatcagcttcttagcatgttgtcctcggaaaacatggataccaacaaaggaaacatgtgagtttgaatagtttcagaatccatcacatacatagtttcttatggttttttttttgtttgtttgttttgttttgtttttttcccagaatctgaccttccatttagaagcactagaagaagaggctttgggaaacactgtggggggtgaaaggtcagaaaccagagagttctaggtgtcagaacatgggcaggcacgaaagctgcgattgaaacatccagagctccagttacataactgcctctccttctactggggcatcaagagctggccagtgtcattagtaatgcttccagcccttgagaatgcttcctgaatttccactgtagacattttagccttccataaactgaatttccaagttttataatcctgaaactttagttaagttcttgatgatcatacttaaaatagatataaacctggataaatcccagtgatcaagagactcaatatggttctttattattattagatatttactttatttacatttcaaatgttgtccactttcctgctttcccctctgaaaatcccctatcccctcccctctccccctgctcaccaacccagccacaccctctttcttgccctggcattcccctacactgtggttcttaatgtagcatttacagcttaatcattttgattcttaattagcccaattaatgtggaggttatctggaataaaaagtccagcatatattgtctatatttctgtagttacttccatcaattttcttttcaaatactggatcctgaaagaaaacccttgagttttctagtagactttgtatcaattatatgagtaaagagaaatcctagatctgacaccagcaagcctgggacccaatgactgctgtcttattttaaagctgcatctataaatggctttatcacacatgttctccagtttaatttaaaggctacattgagaaatagtttcaaaaatctcaaatatatgtacaggaacaaacatttaaaataaacttactccacattctttgtccagtcgggagggttactcattgtcataaatacacagtttgtcaaaatagtgcacatgattaacatgctgaataatgtaggttagtgttaaggaacatacaaaagaaagttcatgcattgtattaaaaaaaaccaaagtaacactgaaaaacccagacctcagttcaacaggactcatgggtaaacatgtgcacaaatactacctaatctccttacatttcactcaaatttcatatgatgctaaatatgcatcatagtgtgacctccacaatttcagagtaaatgagagtatggaaggacataagaatacaagttgctattgcggttgtttttataccagcatgattaccttccaaggtgctttttctaagcgggaagtggaggtggttgggggggtggtggatgcatttctctcttttaaaatgtatttaaattttatttgcaacattgttgagcagaaagcatggatgtgaattaattgcacaattagaatagtaaattttcgaggaaggtgcatttctgcaataccgagatctcgtcgttaatggatagaattttgacgtcacggtcaaagcagagcgtggtgcagagtgctaagtagccgtgttttgagtgagtttatgtaagcacaacagcatgagaagatggaaggggagatgtgtgaaggtcagggctcatcgccactgggatgtaattgaaattccacagtgacacctgttcttgggccaatcggtcacttatcctttctgtgccttcaaccaccctctggctccacctacattcaacacccggatgttaagctggacagactttgttattggtcgcgtagattaaagtaatcagtgagtatgaaatgctcggaagcaatgccgctggagaaatgtgtacgcactgagtggtaggtcagagaagaacaggtaatagggccattgaaagtggctgtaaaaagtgttttagaaatgccagaaataaccgctacgtcctggagaaaacagatgatccgcaggatcttaaaatatgtgttttctgtcttagtagcaggtattctttctactacactcgactaaccacacaaaacatttccattaggtgtagggaaagatttcatcaaatgaccacatgatggcactagaaatgcaaactaagatggaaaagcttttgagtgagcataggcactttttataaggtacatctttagtgttcgatgatagactattaataggactaacgatttacttgtgatcaactggactcaaaaagaagggcctttattttttgttgttgcttttattgtttttgttagttattattttactttcttgttttgttttgtatctccttttgttggtgtagtgctgtttttttgtttgtttgttttattttttttaaatgaacgtttcttctttagtcattgttttttgtagtgccagggaacaaatcaaacccagagccttgtgtttggacaactctttagattttagaatttgtgattttaaaaaaaatcttgctagtatgaccttatgatacttacaatagtatttttatactaattgtgaccaaggccaccaaaagagactcagtcataaatgaaggtttttcactgatcaatatccacgccggaactgagttgcagaaacctttaaacccaaaggcgaccacagaggcaaactcccttcaaccttttagaacagttttagcttctttcctgaatctgcactaaagagacaatgctatacaacagacccatatattctgtggcttaaatctgatattcagccaacttcataaaactgatcagaaaagttgactaactagctaagcctgaagtgtcttgagattcttataagcttacatgatccccccaaaggtctttaaaatggcatacatcatatctgtgtctaatctgtattttactttgaaaatagtttttttgtgtgtgattaattttactgaaaattttatgcaactctgtacaaagatgttgacaagaaacatggcgatcttgcacaaaacttaggggattcaatacatatatgaaagctagtgttagttgtcaatctgacagaatctagaatactctaacagacgggcctcattgcatgtctctggggaattattgtgactgctttgttaattcagacggaaagacccatctactgtggctggcaccgttccctggctgggatcctggaatgtagactagggttcagggctgaaggggtgccttaatggtagggtgtttccctgacatttctgaggccccgggttcaattctcagcactacaaaaacaaaaagagatttccttgaccaacaaaagatattagatgaaagctatagagtatatgcacatttttttaacttaataatacatagaagacacaatgaatacaaacagttaacaccaaccacttgcaaaaggatatgagtgtaccaaaatcttaatagctattttcctaagaggattgaagggtgttaaaatgtacagggcggaggtggcactgaaccggaagatggccttccctttattcaatactataaaagtctgtaaaataggaataaacacataagtataaaacagacttcctattttccaatagggttgcagtgaataattccaattcagatgcccaggacaatcacttttgatatgtaccatgagtacagctctctctggtcacttatgtcccagagatgaacttacagtggctcttaccttccaccaaccacttacctgagtttgtgcatcagccacgagaatgtcctcatttccttaatattttaagtgtcttacttaagccaaagtttgaaatggggacacatttcattttcatcctaacattcacaagaattccttctcataatgatttgtttgcctagatgaagtatcaggaaaatgaatcctgcaggatgcaaaatcattcaacagaaccgaatgttttaaaaataaatattccttcactacccgtgcttataaaataaacatcatcgctccgctggtaatagagaacaaaagcagcttccatctagcccgcacctattggatggatactatccagtcattgatttctgcaggacaggctccctggagagtatcttgttgaccaggagtgctaaattctgtattgggattcctgaggtagctgacacttggtttctaatcccaattgactctcccctgtgtggaggaaaagctcaaggtccctggagaactcaggacccataaatatgaagagcatctacgacaagagtcagacttactacacagcaaagatcagtgtgcagagggaaaagactcaccatgcaatggagcaacacggcttagtctgacacagtcttctaagtcatttactgatactcagcctaggccgagatggatgaagctgacatctctgtgaataacacactaaatagagagaatgctaaggtttgagtttattttttttttagtgactctattctaattcctaagtatggggaatgcaattaaggcctcctgcatgctaagcaagtgttttaccatagggtcatgttcccagctcagggtgtgtgtgcacatgcgtgtataatctataaccaacccagagtgttatacaagggatccaccaccgaatgctgtccccagcacagcttttaatatgtttatgcatctattccttaaaactcccatgttttagccttttgatgcatagctctatggaccctgctatgattagcacactctataacgtgccgtttgttttctcctgagcattttttgatagcatttcttcttcacatttaaactttaggtcactaacatgttttcattttatttttcactttgaccttgagattttcaaatggagcaatccttgaacacagagtttctgtttgaaaatagccctttctctctgggattcaaacagaaaagctctaaatgtactatgaaaatatcccctaagtagtggggatctgttagttttctcagctgtgacacacacacacacacacacacacacacagacaaaatccaactactgagagtaaaacctgtgtttagaaagttgtaatgcaattttgagtctgttgaaaatgatgataaaataaaacaagagactgtaggctgggctatcccatttcatttcagttacttagcaattaatgtcactgtgtcatagataaacagagaccacatcacctgggtgggaaaagtgctgcttctctaagcctgacctttgaccacatgtcatctaatcatcactgaatgggtgcatccagcacaagggagacgaccttaagatgtctgtgagggaggaacgcactccagtggcaatcgcttgtggttggtacatagttcccgttattctctctgattcattcaatatttttgtccctaaacgaccttgtgaaagcatcataaaacatgaatggacttgggtaagggaaatatccttgccttaaggaatgtgagcatccaaggacacagaacgagcaaagcttaggaccaatgatttttttcaaagttcttgcctgtacctccttatccagaaacacagccagtcaaatgtgatagaaatattgggggctagagtaggaactgtagttaaaaaaattgtaactagaaagaatatatactcttcacctaagaatctaatttcatatattactatagaccgattttgaaatgactatggtgatagagatgacaaacgagtttcagggttactgtagcatcttttacaggctggaggatgagtcttgggagggtcagtagtagttcagtgggcagggaaattcccaggctcatcccattgaaactggctatactcagaatcgcaatgacacaggttccttggcaaccttctgtttacatgatgagtaaaggaagctgtagtggtttgaatgagaatagccccagtaggcatgtgtatttcaatatgtgggcctcggatgtcaaaactgtttgggaaggactttgttggaggtcatgtgttaacagatgtaggttttgaggttccaaaagtccaaaccaacctcagtttgtgttctctctgtctgtctctgtctctgtctgactctgtctctgtctctgtctctgtctctgtctctctctctctctgtctctctctgtctctctctctctctctctgtgtgtgtgtgtgtgtgtgtgtgtgtgtgtgtgtgtgtgtgtgtcttattcatggatacagtacaagctctcagccactgttccagcaccatgctggcctgcctgcctgactgctgtcatactttcccccatgatggtcatggactcatgcgaacccctacaataaatgctttccttttcaggtttccttagtcatggagttttgttatggcagtagcaaagtcaccactacaggaacacttgacagaaaatagaaaagagaaaagaggaagcagggacaaaacaggaattattagtgaggccaaagctgagactctgaaacttagcaagagagaaccaggagggaactttaggcactggaactcagcaaagcagtgttggtaatagctcggcaaccccagtcctgattaataattgaaaatttggacgaccagtggttgaacaccttgacataattcttaaattttcaaaggtttctgtcctttatgatatatttgatacatctatttattaaatgcaaataatttgtaaaaacatgttgcataaagaacttcatgtgcaatgtaggtgggttgaaacaggagactgatgagctttgactgcacagcatgctttctgtactttaatttttcataagatttcttcccacccctgccaaggactgtaacaatagtgccagccttgcagaaccactttcattgtttcttacccaatgatagatatattccttttggattgaaacatacatgcaaatgcgagcttcctacacatcactctgaagtgtttatgggtttagcttcaatagctttgcaatagagacagtattcagacttagatagcacctcattatatgtaggattgtagtcgttatgaagtcattaaatttgatttagaacttaagtttactttttccaactggtctgctatttatttttttacccgatagtatctactatgttcctcacaactttactatagttgagaagtcaggttacaactgcagtgccactcagaaataccgcactgaaggcactgcatggaggaaagagaaaaggatccaaggggatcaatgttcacttaaaacaaaggattaactccaaagctaccaaccacccagacatcccccttctctatttacatgtgcaaattgcccagtggcaagcaccaagagtgtaccttttagtagaaggtactaaaccttctactaaacctatcccttgattcatttattataggggggggggggataaatgctttaatctcattactgcaatggagtagaaatataagcacttgatgagaacattttaataccagaataattttcttccttggaacaagtttttaaacaaggcacaatgggtaaattcagatataacctttatgtataaaaactggtttatagatgtatttatgggaactaagtattcctacttaggccttaggacttttccggcgtgtgtgtgtgtgtgtgtgtgtgtgtgtgtgtgtgtgtgtgtgtgtgtgtgtgtgtgttaaaaaatgtctttgtaatatttatatgacaaaaatgaagtcatatgctctaatttaggtgtaaaaggtgactgattagcactatatttgcaaagctttgtgctgcattctgaaaagaaaacacacatatctaaatccgggcacttgcaaaggaatgctcagctacagatagtagcacagatgaatctagaagacgaacatatggaggtgtagatagcttagaactaaccaataggaacataatgtaaagacaaacctgtactttaaccaaggatttctgattgtctaagtactacatgaaaagccaaggaagaggtgaagtgcgtcttactggtgttttctgtaactcgacaacatttgaggataacatcatattaaaaaaatcactgaggtattttatgtgatttttttcacaatgtctccagtcttctcaatctggtcttattctattttaggtacccgtagccatactagctgatgtctatctactgtgctgaacagatttgacctgactttcaaccactcattgacagaccaagtcacactcttcagcaacccttgatggaaaaatattatttcaggtgttaaagaaaagcataaggtggtttgattgaaaaccgataagcatccctggtaatcaacagttttaatgacccctcccctcctgccaaaacaaagaaacaaagaaacaaagaaacaaacaaacaactcaaacctcagggaaaaataacagcagatttgtctcaagttaagagcaagagttttgtgaagcaacagttttgctggttagcgattaatcagtagtgattcgccagttctcaatggttatacaggatatgtggactgggcccttctgcttgctgtgacctagtaacttcatagaacatgactggctgctgcgattactgtcagggatgaaacttggatttgacaagtggtgtatttgcacttttgttttctgaatatacagccattggtggaaactttatttcaatcaagagcccatttaaaaaaaaaaaaagtatacagttataacttaagttctaattttgcatttcatctagacattgccagaaagctgtgacataacagagattacattgaaatgtactccattccctctctaaaagttagctacaggcaaaagtcagagataacatgtgaaagtgagctggatgccaggcatggtggcgcacgcctttaatcccagtacttgggtggcagaggcaggtggatttctgagtttgaggccagcctggtctacagagtgagttccaggacacccaggcacccagggctacacagagaaaccctgtctcaaaaaaaaaaccaaaaaacaaaaaaacaaaaacaaaaacaaaaagtgagctggataactagaaatattttaaaagctgtacatccagatgtggagcctcactcccgtaaagctagcagcccaaagctaaggcaggagtgttgtgagtttgaggcaagattgagtgctggaataaaaccttttctcaaaagaaaaaccaaataaatagtaggtgttataagcagactaaatatattctttgcctggaactttaaatcacaggggatttttaattcacacatcatctgccttctaaaaatgtatctggcagtcaattcctttggaattttaatgcagtttcacagaagagagtaaataaatatgttcttttttattgtttttttttttgtttgtttggttggttggttttatttgttttgtttttgttttttgtctcaaactcaatgtaactttcttccccaggtgctgggatccaagccaggcccaacaagtgctaagtaagcactcctccagtgaactattcccaggccttatgtaattcctaaagaaatataattatgaattaatggtggttggaactgtatcactatgtagaaggaagtgccagtctggaaatagtaacatggctctaagttgggctcaggtgcgcatctctactctgtaagactctggtggtcagactgagaaactgccctaaccctatcagggagtggggcacatttccagaggttccgcagtaaggggcgggggtgggagggcagaatgagagtcatgtaccaacatagcgatgcttcaaagtctgatgcttcaggtagtcagagattcctgtcagtctccatctccgtgaacatttttcattcttgtccaatccatgcgtctaagtctttttccctctctgagaatctttaaatggtctcctttcctcctcccctcctcttttatattcatggcttcaaacaaagattttcctctttggctcacgagggatgacaagtctcctcacagcttacctcacagcatttgcttctcggcagcaggctaacctcaattaatctaacacagcctccaccaagttaatgggtaaggtctttaagccactgattacaagctgaaatgaccagagagtggaaagagggaatgggtatctgagagtcattattgtcacatttataaactttgggagataatttaaaagttaaacagtattgtgcaaaaatagcaaaaattatagatatcagtacttcacaattaacttaagttttaactttggatctactctcatacaaaagagcgcactgtatacagagggaagattctgtcacatctatgttttctcaggttggaagagaaagcagggcagatggagggaatgctatggcattatttgaattgacatttttttgggatctcctaaatgatgcccttcactaacttaaggccatcatatgatagaagatctattgtataccctgcaactagagaatctaacctcctcctcatatgacaggccagatgctctgttagcatcttctatgttttcctttttacagaagcttgtcttcgcatctaaattcagatgtcatttcctttcagaagcccaccatttaagttttaagtgtagttgaattgtattagacgctgatactgagcatggaagatttgtttttacaaagcaggggtttggcaacatgccagtagcttacttattagtttttgcaatcttagacaaactatttaacctcagttttattattctgaagttgagaccaaaactgtcttgaaagaacctgtaaggtaccaacatgaatttaaaatgcaagtgcataatatatagggaggtagcagttgttcatttttacttatctggaataacttctctagaagtttctatcttctaattgtggagaacatctctgctccactgtctgtccttgtggcctaaatacatttgcctcattctttaggacgtgattcagcatgtgacccttacctggtccagaattcttgctcagagtttggaaaacgcatgcacctatcctcaaggttactctgctgtagatgttaacttactgtaactggggactatttttgccatgtgtgggtgagcccacctatgcaggaagccatcacagagcaaagcagagcctacactgtccatgggctgtcctgatggtgtcagtttagattccacgtcttttgttattcaaactagacttggcccataagtttgcttttcttcttcttcttctccttcttctccttcttctcctcctcttcctcctcctcctcctcctccctcttcttcttcttcttcttcttcttcttcttcttcttcttcttcttcttcttcttcttcttcttcttcttcttcttcttcttcttcttcttcttcttcttcctcttcttcttctgtctctccttcaaagtagtttttgctgagttttggttacttttatccaaagggtctcttaactagtatgactagaataaactaaatgtcaaaggtaatttatttgtcctgggacattttctgaggcagaggctaagggctgattttcctagaagaataaaaccttcctcaccctaactgaaaacaaaataagaacttggtacctcaatcatagacactcttgtgatgacagatgagatataaattggaagcctcttatgtgaaccccagtagagagatagtatccatcattttaggtctgttggtggagacaataggttgtttttaatgttaggaaacattcaaggacacagtacagtttttaaatgaatacatttctatattccaaaatataacaagcttctattttcactgcagatctagaatatctttctatttctagtcaaatgccacattgtcaaaaggatatttcttcccatggcactaatgagtcatctgtaattttaagaacataagaggggagacgttttctgaacaaagagtgggtgaagctgaatgtataggcaaatggtacagtagtagctcaagttatgaaaccgacaaaaaaaaagtcccataagaaaaaattgtactcacaaactgaaatgtccttgttacacaaagtgaaggaacaaatagaaagtattcagcttcgactcataccttaaaggtcccctgaggacagcaaccatgagatggaaactcagtgcattgcaactttgctatctcctttccacttcacggttgttactgtttctttcattgctaataaaggatctctgatcacagcttaaatcactttaataattttagtagaacatttgattattacataatttgcagatcagaaactgggtcaaagaggataaaaatatgtgggcatatgtcacgataacatataccactgtcagtgacatttccactagcccaatggcattggttatctttataaaaagaacacagagagccctggcatgctacagtgccttcacacagcactctgcacatatggtgcacctgcactttagcctgaggtataccataaagaatacattctgtaaccattgtcatggtcaatgctattgttcaatatttgcccttcccaaaactcataaattgaattattccataatacaaggtgggaatatttaacaggttattggttaatgaaggctttgccttcaagaatgaattggtgcctttccagggtaagataatagacccttcttgctcctccttgccttaaacccttccaccatgtgatggtttagttcctcaatcttggactctctggtctccataagtttaagccaatccatttcttttcattataattccaaatgttggatgtgatgttacagcaggctaaagggtcttagagatttggctttttaaaatcattttacatattgctaataaatgagcatgatgatttatataaaaataactcattaaataagttcaatctaagggaagccattgatgtttgcatatttcaactcaatcttcaaaacaaatccatattcacagtttttttcagtcatggagaatctcacccttaatgatttttgaccagtagaccccttggctgcttcaactcattcacttttcccctcccttctaccctccttccctctatgtctcccattctctctctctcattcatatatatatgaaggctacatagtagtcactaaaacaaaattagtgatcaaatattagaagaaatattcttttaaaagactgagatttttactaagcaacttcaatgtaaatcagagaaaacttaatgtttatgaagattataccataagaaaacaatctatttatgagagaaaatttaagaccagtaacataatatacaggcaacctaaagaaggttttaaaacagagcactatgaaagaaggcaacattctgaatgtggcttggccatgtgttctaaagtactctatgctggacaagctgacacattcctacaatccctgcacctgtagaaaggaggagtgtgagttcaaggccagcctgggatacatagggaattgctgtctcaaaaactaaagaatgaagcacatagcgtgtctgtttaaaaaacaaacaaaaaacaaacaaacaaacaaaaaaatcttagctctagaaatgtctacctgcgctgctatccagtggctcacatctggagatctgtttggtggaagaataatgtgaaaatgaaggacatgcctttcattggaaaaactccttcctgataacaatatctctcctatcaggttgttctgcttgcacaatgtgatttgttccaaaatgtctgaatgtttttccttcttcacacaatgtgcatttgaagataaggacagctgatgtcaaaggcaggttgggggcaggggtaggaaagctgatctggctgccaagtcatcagagctgggcttacaccttgagctttttgtaaaagctttaagtatttgtcactgggttatgtgattttgttttccattttcctttatgccattgtttttaaaattttaaattcaaaataacccagtcagggaccatcatgggtagaaccacccctcaaaacagtatctttcatcaatttaaaagctctttgtttttgaaaacatattcttttgcttttatttttattatttgttgattggttgattgattttattttatttttttaagacagagtcttactattaactttggatggcctggaacttgctatttaaatcaggctagccttaaactcacagtgactctcctccctctgcctcctaattgctgggattaaaggtgtgtacaaccaggcctggtagtctggaagctctttaatttaaaagacaaaaaaaaaaaaaaaaaaaaaaaaaggatctgatagtttgatagtttgtatggtgatttgagtaagaatggctctcataaactgaaataattgaatgctcagtaatcaggggagtggtattacttgagaaggattagaaggtgtggcttgacatagttatggctttgatggaggaagggtgccatggaagagggctttgaggtttccaaagctcaggctaggccaggcccagtggttctctcttcctgctgcctgtaggtccagatataaaactcttagctacttcttcagcaccatgtctgcctgagtgctgccatgctcccagccataatgataatggtctaaacctctgaatgtgagcaagctccaaataaatgctttctttttataagagttgctgtggtcatggtgtcttttcatagcaatataacactatgacagtctggttaccacatagtgaattactatgctttttaaagtgtttccatttggtcttttattcctttatagatttataaataaggacatcgtataggggctgggatactggatttcaattttgtattttgacagggcctcctcttagtaatttttatcattaataaatcacttttatttatctttgtttctatataaataaatagtaactattaggtggtggatttggtctgtaaattggaggtgccatgtttgggggagtaaatacctgatgaggaaaaggctttctaacctggaccataggagcctctgaaacactgcatgcccccccgagaattgtaagtaaataaacacaatccatgagatgaaccaatttctatgtggaacacatctggatctttattttgtaatttcctcatattcacttctgacaaatagcaattatagaatgaacaatctcctaaattgactacttttatgtcaccttgacataagctacagtcattttggaaaagggaacctcagttgggaaaatgccccttctctagattggcctggaagcaagcctgaagtgcctttacttgactgatgattgatgtggcatggcctagcctgttgttgtagtgccacccccaggagggtggtcccaggtgctataaaaaaaataggccaagcaagccagtgagcgtgctcttcccccgctcctgcttcagttcctgattccaggttcctgccttgattttctgccccagctttcttcataatggattgtgatgtagaacggtaagctgaaataaatcttccctaccttcaagttgtcttgggtgtggatgttttatcccaagaatagaaactctaactaagacatttctctcaccccaagctaccacatatggcagcttttgtcctgacaggaactgggctaacagtacagtgtccctaaaagtttggagtattttaggattcgtggtcaatgaaacacttgacttgcttggttatatattcccccaactttaacaactggcaagtgtaattggctagatagtgtcttcaaaaagttcaagccagtatgaaactgtatcaatcttagaaacagagtctttgtagacataatatggttatgatatatatgcatatatacatatacgtacatacatacatatatgtgctgaaatggttgaattgcaatatgcccccaacaatcctatatatgtgaactataagccaaaagaaatcattttcccctaaaaacaagcaacaaaacaacaataacacaaaatacccatgtatattgcataactgtattccatgtggaaacgattacttaggaagttatttattatttataatatggcatagaaataaaaacctcttgtgttgtaaaacttccttccatgagaaattcacacaatatatttttaggtctttggtaactcagggtgacttcaacatttcaaggtacaaaaaaagtacttaaaattgcttagtccttgtaatcttcagtgagagtttttttttaatttgttaaattagctgcctacaaaatcttatacgtatatttagatttctgtcatggggcatttggggcagctccatatggtataatataatttatttacttcttatgaatatgcataaaccacccaccaatctggtctcatttcttaagcagagggattgttaagcctgtgctactttagtatgtgaggtttctgtaacagtccaatgtaaatgtagttagtggcaaagtatacctgataaaaacacttaccttcttattgatatagtaggggtccaggtcctccagaggctccgacaccatctctggaggaatgtctccatagataaatggaaggttcttcccagcttccaagtcactgtttggctttgggccattttcatcatcatcttttttgtctggcttgggattcttagccttctcttctgcaatgcgcctttcaatagctgcaagggattctctggtgaagaagttgaagctgtcaggtcctggtggtacaagcactgtttgctccatcttgtcatcctgcacattttaattactctttactcttcatgtgagattcctaaggagggaagaaccagaaacgtggagaacattaaaagttatcaatatcaataaatactcatctagaaaagtgggccagaagacttaaatttttttctcctccaaaatttaaatggaaaaaataaaaaaaatgtttacacaaattcattctctatgttgagctttggccaagcattcttgtatgtttaggattgtgctttaccaatagaggaactaggctgtgagtttaaacactggttcagtattgctctgagtacattttgataattgtcgccacatcactgataaactgttcactctgagatgtacctgtatgatgaagacgatgcccactgatagatcaatcaattcaaaggtatcacacacacacacacacacacacacacacacacacacacacacacacaaccaaaaaaaaaaaaaaaaccggaaccttgtctctgagatctaaaatgcagccattgaggcttaacaagtaaggacaaagcagtttaactttgttgcagtcaatcagaatcacataaaaagacagtcattgctacactacttatgcctgtgtacaccctgagatgtgggtgaatagatctatggcctgagaactacattagctctagtagagtctctttgacaatgacaatccaaggtgggacaaatgccattaatatggctgagatggacataaactaaactggaaaggaagctatgtgcacaggaggtagtagaaatgttcttagttcaaggaacaatgtacttttcttcaccgaaacaattctgatacatgggagagtctgcagtcctgcagatattaaggccaaatccaagatgcatccttttaaaggtatacttaataagaactcaaatttcacacatatatctgtgcccaaacttcccagagctcaagttctgcctggtacagactctgttttaatagtctgttagctcattaaagtcagcaagctcaatacaattagttgcagctttgatgtctaggtctctaatagaaaactacagcttcctcttcctctcctcccagtgttctccctccccccattcacctttccatttcttctcagagaaagtgaaacctcccattgatatcaaccctcctcccccaaccttggcatattaagatgtataagactagacatatcttcttctattgacactagacaaagctgtccaattagggggaagggatccaaagtcaaccaatagagtctgagagagcccctgctcttgctgatagagatctcacatgaggaccaagctgttaagctcttacatatgaatagcgggtcatcccatgcatgatgtcttgttggtggttcagtatctgtgagttgctatgcgaccaggttagttgattctgtaggatctcttgtgttctggatctccctggctcttcctctccctctttgacaagattccaaggtttacctaatgtttggctgtgggattctgcatgtattttcattagctgctgcatgaagccactcaaatgaatgttatgctagcctcctgtctgcaagaacagcagtatgtaattaatagtgccagaggtgggctccctctcaatgcaatggaatcactgtattttatctcactcattcattcagatcatcctgtctaggtatccctctcacctacttgatggttttgagtctaaatgtgcattgaattctatcttagtgtgtttatttgttcttctccttttttttctcttattctataaaccctatcttttggtttgtttatgactgttgagtttggatctcagcatgcaccaaaggtggagtggaacttgctccatggctcatactggctttgaaattgcaattatcatgttatactttcctaattgtttggattgtggtcttgcaccaccatctctgattttattctatcaattctagtgctgattctacttatttgatgtgtagataatacttatgatctgatatttggaagtgaactgaactatttacagccttatgtcacttaaaagcatgagtatatattgagaaaaaaatcagtagatgattttaatgtggaaacataatagaatacttaaatggacttacgtagtatagacaaatcactcaacattaatgcatcaaagagtccaatattcacgagacgtatgaagctgctatcagcacagtgtggcctgctcttttattaccttaaacatctttattagtagaaatatactctaaaatatgattaaaaagaatattatagaaaatccacaaactcttgacagagctgctgttatcatcatcgagtgttatgatacaagcataattgaaaggctgccatgatctatgggactggcagcagaagatgtctgtggatgccaccattacctcacatgtcctgtgttgtgccatgagtttaggatggatacatgaataagtattgggacttctaagctccactcatggagccagctttgagttgcaatctgtctgtgaccaaggcaccagtgtgcagtgcttgataatcctgccgagcacatagatctttgcttctctctctctctctctctctctctctctctctctctctctctctctctctctctctctctctgtctctctctctctctctctctctctttactgagaacaaacgtaaacacatatataagggcatttgtttgtttgttttttctcgtttgtatttctttgctgtttcataggtttagcattatcttttgtatgcaaatatttaaattttggattgcagcataatttaaatacatactaattgcatacaatttcagtctttctgaaagggtgcaacaacagggtccatttttcataaaattgtgtggacagaacagaagtggctacttcaagccttcctattcagtaaaaatgagcaacccacaagacctaacagtattatggtgtgcttacagccaggagcctagcatgtctaccctcagagaggcccaaaaagcagctgactgagacagaagcagaaacttacacccaaccaattgtctgaagtcagggacccctgtggttgaattaggaaaaggctgggagaagttgaggaggagggcgaccccataggaagaccagcaggctcaataagcctaggctcttgagatctctcagacactgagccaccaaccaggcagcatatactagctcatccaaggtcctggacacatgtacaagtaggacttcctggtctggcctcagtgagaaaagagcccctagctcttgagagacctggggctgcagggaatggagagacctggcaggggtgttggggggagtgtggggtgtggagaccccttagagatgggggtgggagggtggggaggagaaatgggatgaggaactgtctgagggcagaatgggagggggataacaacttgactataaaagaaaaatattaaatataattaaatataaataaaaagcagtataagaaaaaatgaaaaaaaaaaaaaaccttagggctattggctgtcagtatcaactgagtaaacaaacagccaaaaagataggcaaatactactgatgaatatgaccacttcaaatttattgttataataatgacctggttcagttacagtaattacactcatatgtgagtaatttaactaaatactatactgataacatattcaggttagggggaaagtatttcttactttctgattagaccttgtattcaaatactaccaaaaagtaaaacataagttatattaattataagaataataccatttcaagattgtgatctggggctaaagagatggctttgctaaaggtgcctgttcatgcctggtgaccttgagcttgctgtctgccccacagggtggatggagatgactgattcctgtgagttctcctctaagctccaccatgccacttttccatctccctccctctctctgtctctctctgtctctctctcttaaacaaacacacaggtacacacacgcacacacagatactagctaagtaaacaaataactgtaattttaagcatgatgacctgttccataaggttgcttatgaaatatctgaagctgtcaaatatccttcaatattaatgttttcaagcaatattatgggcaaaaatctatagattttagtttgaacttctactttctctatccagaaataaccattaggatagaaagaaaaagtttggatttttaacttaaaatttttaaacatttaaactgaaaactgagaatggtccccatttgtggaaacacatgcctcattagagatgtctcatttgaggaccatgtggcttgaggcttgtggcggtctctttactttagtgtgactttggatgccttggttacatagagcagcccgtgtacccttcagtagagatagccaacaaatcgtggtaagaaaagtgtcaaagagagagtaatattttaaagaaaaatataagataagaacttattcaaaatgcaaactcacatagttatgaagaaagaaaaatgatgcatttcattaacagacatacttaaaataataaaaagaagtaaattgccaagaaaaaaatgaattattcttttagaaaatacttttaaaaattaaatatagacaagtcattcgaaagaaggcaacaagaaacagtaaaatctcctaaagacactggaatagaagtgaggacctgagggctggagggatggctcagaggttaagcgcactgactgttcttctagagggtctgagttcaattcccagcaaccacatagtgtcttataacctctgtaatgggaactggtgtgtctgaagtgaataccacatatgtactcacatacataaaatgagtaaatcttttgaaaaaaataagtgaggaaaacatttaaaactaataaaaatttaattcacaatgggaaaaacagggatgaaagagaaataagaatgaattacttcattcaaataggaaccttctggctttatcgtcaccaacaattcatactttatcgtcaccaacaattcatactttatttctataacttttaaatgtttttctaaacctggtaatcccagctatcagttaatatggttattcaatatcagtacatcttagctatattatgccacataattttatgtgtgaagcaatgctatatgtgtagtgtcttctaaaatagcatggtatttatagtgaaaattagctggattcttgctaacatgatggtcagctcctgcaagccttaccactattttgaggacatcagtcctctagatagcacccttcttaattaaatttttggtctactttgcaaaatattctactgccaaaaattaaagtcaggtgaaatattattcttattgatattatctcacaaaaataactaaaatatttattagtgtgtgtgtatgtgtgtgtgtgtgtgcctgtgtgtgcacaagtgcattaagtgtgtatatggagacttgtgcggggcataaaactggaggtcagagagcaactttgaagagctgcttctttctttgtaattttatgtaaattcctaggattaaactctagtcaacaagtgtctttgcccactgagccatctccctgatcacttaaccactgactaattctataaggcttgcattgtacttagtgcattctttgttcttgaatcaaaaaccaaaaccaaagggacacaaattgaaaaggaagatgtcaaaatatcactatttgcagatgatatgatcgtatagttaagtgatccctaaaattctaccagagatctcctaaacccgataaacaacttcaacaaagtggctggattataaaattaactcaaacaaatcagtagccttcctctactcaaaggataaacaggctgagaaagaaattagggaaacgacacccttcacaatagttacaagtaatataaaatatgttggtgtgacactaaccaagcaagtgaaagatctgtatggcaaaactttaaatccctgaagaaagaaattgaagaagatggaaaaatctttcatgctcatgattggcaacattaatttagtaacaagggacatcttgctgaaagcagtctacagactcaatggaatccccataaaattcccactcaattcttcatagagttagagcaatttcaaatgcatttggaataaccaaaaacccagaataatgaaaattattctcgacaataaaagaacttctggggggaatcaccatccctgatctcaagctgtactgcagagcaattgtgatttaaaactgcatagtaatggtacagtgatgggcaggaagatcaatggaatagaattgaagatccagaaatgaaacccacctacctatggttacttgatctttgacaaaggagctaaaaccatccaatggaaaaaagcattttcaacaaatggtgctggttcaactggcagtaagcatgtagaagaatacacattgatctgttcttatctccttgtacaaaacacaagtccaagtggaccaaggacttccatttaaaacaagatacactaaagttaatagaagagaaagtggggaagagccttgaacacatggacacaggggaaattttcttaaacagaacatcaatggcttatgctctaagatcaacaattgacaaatgatatctcataaaatcgcaaaacttctctaaggcaaaggacactgttaataggacaaaaggcaaccaacaaattgggaaaagatctttactaatcctaaatccaatagagggctgttatctaatacatacaaagaactcaagaagttagactccctttactacagagcaattgtgataaaaacagcatggtactggtatagagacagacaagtagaccaatggaatagaattgaagacccagaaatgaacccacacacctatggtcacttgatcttcgacaagggagctaaaaccatccagtggaagaaagacagcattttcaacaattggtgctggcacaactggttgttatcgtgtagaagaatgcgaatcgatccatacttatctccttgtactaaggtcaaatctaagtggatcaaggaacttcacataaaaccagagacactgaaacttatagaggagaaagtggggaaaagccttgaagatatgggcacaggggaaaaattcctgaacagaacagcaatggcttgtgctgtaagatcgagaattgacaaatgggacctaatgaaactccaaagtttctgcaaggcaaaagacaccgtcaataagacaaaaagaccaccaacagattgggaaaggatctttacctatcctaaatcagataggggactaatatccaacatatataaagaactcaagaaggtggacttcagaaaatcaaataaccccattaaaaaatggggctcagaactgaacaaagaattctcacctgaggaataccgaatggcagagaagcacctgaaaaaatgttcaacatctttaatcatcagggaaatgcaaatcaaaacaaccctgagattccacctcacaccagtcagaatggctaagatcaaaaattcaggtgacagcagatgctggcgtggatgtggagaaagaggaacactcctccattgttggtgggattgcaggcttgtacaaccactctggaaatcagtctggcggttcctcagaaaattggacatagtactactggaggatccagcaatacctctcctgggcatatatccagaagatgccccaactggtaagaaggacacatgctccactatgttcatagcagccttatttataatagccagaagctggaaagaacccagatgcccctcaacagaggaatggatacagaaaatgtggtacatctacacaatggagtactactcagctattaaaaagaatgaatttatgaaattcctagccaaatggatggacctggagggcatcatcctgagtgaggtaacacattcacaaaggaactcacacaatatgtactcactgataagtggatattagccccaaacctaggatacccaagatataagatacaatttgctaaacacatgaaactcaagaagaatgaagactgaagtgtggacactatgcccctccttagaattgggaacaaaacacacatggaaggagttacaaagacaaagtttggagctgagatgaaaggatggaccatgtagagactgccatatccagggatccaccccataatcagcatccaaacgctaacaccattgcatatactagcaagattttatcgaaaggacccagatgtagctgtctcttgtgagactatgccggggcctagcaaacacagaagtggatgctcatagtcagctaatggatggatcacagggctcccaatggaggagctagagaaagtatccaaggagctaaaaggatctgcaaccctataggtggaacaacattatgaactaaccagtaccccggagctcttgactctagctgcatatgtatcaaaagatggcctagtcggccatcactggaaagaaaggcccattggacacgcaaactttatatgccccagtacaggggaacgccagggccaaaaagggggagtgggtgggtaggggagtgggggtgggtgggtatgggggacttttggtatagcattggaaatgtaaatgaggtaaatacctaataaaaatggaaaaaaaaaagaaagctcagcactacaaaaaaaaaaaaaaaaaaaaaaaaaaaaagaagttagactccagagaaccaaataaccctattaaaaatcgggtacagagctaaagaattctcaactgaggaatcccaaatggtagagaagcacctaaagaaatgttcaatccgggcgtggagaagcacgcctttaatcccagcacctgggaggcagaggcaggcagatttctgaggtcaaggccagcctggtctacagagtgagttccaggacagccagggtgatacagagaaaccctgtcccaaaaaaccaaaaggaaaaagaaaagaaaagaaaagaaaagagaagagaagagaagagaagagaagagaagagaagaaaagaaaagaaaagaaaagaaaagaaaagaaatgttcagcattcttagtcatcagggaaatgcaaatcaaaacaaccctgagattccacctcacaccagtgagaatggctaagaccaaaaactcaggttacagcagatgctggtgaggatgtggagaaagaggaacactctttcattgctggtgggattgcaagctggtaaaaccactctggaaatcagtctgttggttcctcagaaaattggacataagactacctgaggacccagctataccactcctgggcatatacccaaaagatactacaacatataacaaagacacatgttccactatgtttatagcagccttacttataatagccagaagctggaaagaacccagatgtccctcaacagatgaatggaaaattggtacatttacacaatggagtactactcagcaattaaaaacaatgacttgatgaaattcttaggcaaatgaatggatctggaggatatcatcctaagtgaggtaacccagctacaaaagaaccacaaggtatgcactcactggtaagtggatattagaccaaaagttcccaatacccaagatacaattcacagatcacatgaagttcaagaagaaggaagatgaaagtgtgaatgcttcagtacttcttagaagggggaacaaaatattcatgggaggtagagggtaggggtgacttgggaggaagagaggaagaggagggggaaagggaggcaggattagttatgagaggagatggggatgatatacagaggggcaggaatttgaacagaggtgtgtagcaatgggggatagggaattggggatatccatcagcaagtcccagatgccagcaaagattggggggaatgagaccacccactcatctcaaaattcttaacccaaaagggttttcttgtctaaaggaaatacggggacaaagtgtggagcagagactgaaggaaaggctatccagagactgcctcacctggggacccaacccatagacagacactaaacccaaacactattgtagatgctaagaagtacttgctgacagaagcctgttatagctgtcccctgagaggctctgccagagcctgacaaatacagaagatgcttgcagccaaccattggacttagcacagggtctctgacgtaggagttggagaaaggactgaaggagctgaaggggcttgcaaccccatagggagaacaacaatatcaatcaaccagacctccctgccccagagctcccaggaactaaaccaccaaccaaagagtatacttggagaggtccatggctctagctgcatatgtagcagaggatggcactgtctggtatcaataggaggagaagcccttgatcctgtgaaggcttgattttccagtgtaggggaatgccagatcaataaggtggtagtgggaacattctaatagaagcggagggagtagggatgggagaggaaaccagaaaaggggataacatttgaaaagtaaatacataaaaatccaataaaaaagtagacaacaaactaaaacaacaacatcaaaagaaagaaaggaagaaagaaagaaggaaagaaagaaagaaagaaagaaagaaagaaagaaagaagaaaaaagaaaagaaagagaacaaaattttttttttttaggtcaggatctcttttcctaaccctgactgtcctggaattcattgtccagatcaggctggccttgaattcacagtggccttcctttgcctcctgagtgctgagattaaaggtgtgcaccatcatacccatcctcaaaagctattttgacagaataaagtgctgatatgttctcagatcaagagcctaaaaaccattaggaaattctttatatactatcaatttttgagaaatatacatttgtataagctctgtttttatttgtggatgtatatatgtattttttctgtgttatttctattatgtagtctttacttgcttgaagtttcagtttaatgataaatgccctcttctctcttgaaagtgtcttaaatgtatctcaaatatgatgccaaatattctggtgtaggggagagaatgatatggatgagcagtgagagtctttaggttggtaaggagattgcagggtcataaacaggatgacacagtctaacagggcaatacacccagatgaaaggtgtagcccagattaaaggtgtgttccttaaactcggagattcaatcttctggaatccattgccactatggctcaagatcttcaaaccaagatccagataaggatctccaagcctccaaataagggtcactggtgagccttccaattccggattgtagttcattccaaatattgtcaagttgacaaccaggaatagccactacaatccaccccttgtcaacttgacacaaataatatctcatgttcacatgaaacaataacaaggttgtaaatatgcctaacatgatataactatctctcgtacaatcgcaaatgcattagtaaatttacaatgggcattcactaaaaagacagagaggccaagacgggtttgatgaggtgaagtggcacttcttgatattcagtcggggctgatacccaaatatccacttagttggaggagaattattcacctgggtgtttaacctgcaggcctccccaaccagtggaaatcctgctatgctcttcttgcccttgtataattttgagtaatagacttttgtgctgatggaatgagacttataaactctagtcaagctttctctgaagcactgtgtgtctacatagcctcatgctctaggtcctttgctctgagaatggtatatctcaaatgggtgcttcttcctcagtctggatcctggaataagaagacacattcactggatgtcaagagaaagctaataggactcaaagggtctaaaagtaacgatttatcagtgatgtttgacagtgatattactaacgagcaagtgtatgccattgatcaaagaccaggctgctaaatgagttgaattaattaggaatatttgtctctcagacacaaatgttgccagagattagatattccacacctcatgagtctccacctatagttctagatgaggaacacattatcattaggcaatcagtgaaatcatggccttctaacaatcatatagcaactcaggaaaatttgttcaaaggatgctaaatagcctatatcaagaatacaaagagtgggctggggagtagttcattagtaaagcagttgccatgtaagcatggatatctatgttcagatcttcagtacccattgaaaaagctgcagcatcatccaatgcctagaattccagtgctggaggagcagagacaggggcatcatgtgggcctactgccctgacagtccagctgaatcaagaattttaggttcagtgagagatcatgtcacaaaaactaaggtagaaagcaacagagaaagaagtgtgatatttatctctggtctctctatgcacaagaacacacacacatgctcatacacaaacactccacactcctgggtatatacatgtctacactcatgagcacatacatgcataggcacaagcacacactcccaaacagggatacatacaaaaacacacaacaaagaatatgtattatcaatcagaagccaattatttaagttaagtagtaaaaaattcttctactaaaaagacaaccgtaccatggtgaggaaatggtccagtcaatgatatttgctagaactgtcattgtccatccatgtgtctatgctgcagcatttaagatatcaagaaggagctggcctagtgagaacagaaaatctaacatggctgctatagcttactgactagaagttaagtgcacacttcctaaaagaaggctttgacacaagccacttcagttccctcctcattttcttgtccccattcctctctctgtagaattctgagatttcaattcagttttatacagaaaccacattactgtaagccctacaaagttatggcaatatagctatatggagtcaagtaatgtaggttatttttttcccaatggtgctggtgaaggtggcaattatgtagctatacttagcagactgaggaaattctgctagagtcagcatttgtctcttcattgctatgaaacagtaatggaaaaataaacaaaaacaaaaggcaaacactatgcataattccctcagatcatattaacatgtgatgttggagtaaattgttataaccccattttggaaatacttaccttaattaactatgatttccttaaaataatgcagtatttacaatctatatgaaagcactatatgggacacatggtatgatggaacagtgcacccaagagacaccaagaacattcctgtctgtggcagtcttttctctatacagaggcatttagtctcaattgctcagagttattttacgttttcagtgactttcactgttcattcgtgtgcatattgcctggacaacacaggatgaaaaatggtccaagagaagtctttgacttgctaaagcaagaaagatgtttaaaatatgcgacacatgaaatatcccaaaaagtgtagaattctttttgagaatgttgatgtctctttagcataaagctaatttgaaggtgtccttcttatcctaatattttcttacaaaaccagctcatctcaaagcaaaagtgttcaagatatagttgatggagtaaggagtttagcacacagaacacagggacagctacagagaaacagcaaatagccaaggcagacataaagaggctgacaagacatgagagagaagagtattaaacacagatcagctacctggaaaatggctctctggtgttccacacttcctctcatctggatgatctagaaacacagtaactgctctgagttaagaaagcctgagaccagcagtgtgtgggtggcctgcattaagttgattgataaacattctacatataaaatctgtacccttcacaagtttggtcaatgacacaattctattgtaataccatagactcatgttcaaagaagaatcatttaaggacagagtgtgctgaaagaatgtataggaaataagtcacaaaagatgacataatttcttgatttaaaacctcacaggatcataggatcagaggtgaggaggacacaacatctgtcaaaacacaggaattaactaggaccaatgggacccaggcacacaggaactccaccagatcagtggcacaagttccttctggtctgtctgggtcagtgccctgagcagaccttgggcttgaacttcacagccagtcccacaacacccagaggaagctccactcccaagtgctctaacatgccgaggatcacaggatcacagaagcttggtcacaccaggatctcagggtcccagaggcagcttaactcccaggagctctgacccattcaggatcccagaaccacaggatcacagagacagcttgattctgaggagttctgacacaaccagtatcacaggaaggatgagctccagtcagatatagccagatatatcaggtagcactagagataatcagatggtgggaggcaagcataagaacataagcaacagaaaccaaatttacttggcatcatcagaacccaattctcccaccatagcaagtttggatacaccatcacaccggaaaagcaagattcagacctaaaatcacttctcatgatgatgatagaagactttaagaaggacataaataactcacttaaagaaatacagttaagcaggtagaagtccgtaaagaggaaacacaaaaatcccttaaagaattacaggaaaacacaattgaacaggtgaaagaaacaaacaaaccctccaggatctaaaaacaataaagaaatcacaaagggagacagctctggagattgaaaacctaggaaagagataaggagtcatagatgcaagcatcaccaactgaatacaagagatagaagagagaatctcaggtgcagaagataccatagaaaacattgacacaacaatcaaagaaaagacaaaaagcaaaaagctaatccaaaacatccaggaaatcaaggacacaatgagaagaccaaatttaaggataataggtatagcagagagtgacgtgttccaacttaaagagccagtaaatatcttcaacaaaattatagaagaaaaattccctaaagaaagagatgcccacaaacatacaagaagcctacagaactccaaatagactggaccagaaaagaatttcctccagtcacataatcaaaacaccaaatgcactaaacaaagaaagaattttaaaagcagtaagggaaaaaggtcaagtaacatataaaggcagagctatcagaattacagaagtcttctcaccagagactatgaaagctagaagatcctgggcagatgtcattcagactctaagagaacacaaatgtcaacccaggctactatacccagcaaaactctcaattaccatagatgaagaaacgaagatattccatgacaaaaccaaatttacacaatacctttccacaaatccagccctagaaaagataatagatggaaaacaccaacacaaggagtgaaactacaccctagaaaaagcaagaaagtaatctttcaacaaacggacacaaacataattccacctttaacaacaaaaataacaggaattaacaatcacttttccttaatatctcttaatatgaaaattaatattaccaacatatcttaatgaattgaaattcaaatatatgaggaattagaaatttgtcggctgtcttccagtggtctctctaatttggtaatgggagaaataggtccaatattatacaatccatatacactttctgcttgtttgtatatgacaaagtctagctgtgtaccacacaatggtcttgaaatcatgcttctcctatctcagcatatctatttgtaggattgtttatttaatgtttttacactactctatggttttcagaacagcttacatatttcaaaatcatgtatacagcccaaagaaatatagaaaattaatttgggaggtagcttgtaagagaacaacaaagagtgagactgaacttttttttgatatttataattattgtatcaattttgaagaagaggaccttataagttactttttttctgatatgaatgtttttcagaattatcacagtcaaaggaaccagaatcttacactcacctaatgtctgtgccaccctccaagcagagccattgttcattgaaacaattgatgaatgactccatggatagaccatcttaatacacaccatttcttaaatgaatgtaacctgctccctgtaggctgagaatgatgacaatcactcaagtcaaatagttttgattatagaaggaaatatgtatccaaataatcgtgcctgcaattcattccttggtgcagcagaactgtcaactcttagcttaactactatggaggtaaaatcctttggtgatgtgagggacattgaagtacagactaattacaatgaactccaatatctaaaaattgttcttattttgggtttgtaccacagtaagagtcaagattttaaagctctactaaaaacaaaacaaacaagtaaacaaaatgactttatttatgttcatttaataacatgtcgatcattttatgattggtataaaaatatatattgtgctgaatatgataaaaaattagttcacttaaaaataaaataaagactcactattttaattgcctctatgcagcatttatcatatatgatatcaaattacatctaatttattattcaaaactatactggttagctttcaatctgacagttaaagtcagtcaaccagtgtttcttttgtgatgtactggactgatttatagagacccttctgggattcttagctttctgtgtggtcaccagctaatgactgtcagctctgtacaaaggacacactaccagatgccaggacatctgtcacagcagctaggacacagagccaaatctattcttgtcttgatgtatgacacacaatatgtacaatcagttttgttcattttgaaagtattctttaatatatgctacagacaagaccctgcaggacagtgaagaccgtacggtggcagggggagtggaaaataacatagtattgggatcttgagactaaagcaattttcttcacaagattctttatgaaatcagctctgagattttgatttgttttggaattttgatgtttctgaccttaatggagtgatgtattagtcccagaataggtgaaaatgaaggttaaacatttttggcatcaacttaaaatacagaaaacctcttttgacttcttgagtctgtttgtatgtgtgtgtgtgtgtgtgtgtgtgtgtgtgtgtgtgtgtgtgtgtgtgtctgtgtgtgtgtgtgtctgtgtctgtctgtctgcctatgcatctgtgaaaaggcaaggagcagtaacactatcctgaattattactaatttatttaaaggtaaaagaataaacatcatgtaacctctcttaataaatctcacataaagtggttttttttctaacaatagattcacattttaattcttatttcaattaaagaacttttgatgcattaagctcaaaaccataaacatgtcagataacagaacattaagttcaaggaatatcctacactctttagttctaactagttttgaagttatgttcctttttctcatagatcaaatggtgaaaaactataaaatagtactattaatatacatatgagagatttggtttctgaatctatgccttttctcctactcagcatgtcttctaacattttttggctatttttttattggttattttatttatttacatttcaaatgttatcccctttcctggtttcccctcaggaaacctccattctatcttctttccccctgctgctatgagggtgctcacccacccactcctgcctcactgtcctagcatttccctacactgtggcattgggccttcataggaccaagggcctcccctcctcctgatgcccaataaggtcatcctctgctacatatgtggctaaagccatgggtccaaccatggttggtgttttagtctttgggagctctgggggtctggctggttaatatttttgttcttcctatggagttgcaaactcattaagctccttcggttcatcccttaactcctctattgtggtcccaatgctcaatccaatggttggctacaagcatctacatctgtattggtcaggttctgtcagaacctctcaggagacagctatatcaggctcctgtcagcaagcacttcattggcatcagcaatatagaaaatgtggttacatttacacaatggagtactactcagctattaaaaacaaggacttcatgaaattcttaggcaaatggatggatctagagtatatcatcctgagtgaggtaacccagtcataaaagaacacacattgtatgcactcactgataagtggatattaggaataaagctcagaatactcaagatacaactcacagaccacaggaaactcaagaaggaggaagaccaaagtgtggatgcttcagtcctacttagaagggggaacaaaataatcactgaaggtagagggtgggagggacttgggaggaggagagaagggggaagaggaaaaaggaggcaggatccaaaatgggaggagacaggggagatgtagttcagatgacaggtcaggagtttgaacagaggtgtgtagcaatgggggatggggaactggggatatccaccacaaagtcccagatgccaggaaagcaagaggctcccaggactctatggggatgaaattagatgaaatacccaacagaggggagagacaacctgtagagaacacatctgaggttaggcatggcccccatttaaggatgtggctacctacccatctcaaacattttaacctagattttctcttgtctaaaggaaatacagggacatagagtgaaacagagactgaaggaaagaccatccagagactgccacacttaggaatccatcccagatgcagtcttcaaactcagacactattgctaacatttcttttttgtttgttttgttttttgctttttgtgttttcaagacaggttttctctgtacagccctggctgtcctggaactcactttgtagaccatgctggccttgaactcagaaatccgcctgcctctgcctcctgagtgctgggattaaaggcgtgtgccaccacgcccagctcaacatttcttaactatgaaaaaaataacgtttttgttatgctcaacagcaggtggcagctgacaaagtataattgtatgtggtcctgaaacattgtaaataattttaatgttattataacattcaacaaaaacacccaaattatttttccttctacttaaatctcaaaattatgctaccatctctaatctcaacacaataagtgaattctgaagcaactaagctaggtggggcattattggttttagtttagaaagcacgcacagttagtctactgtagcagtgcccatttgtggaaatttctgctcctttcttcatagactcctgggtggaagaaaagtgagacctcaacaacagcacttcatctggaactcaacttccagaatggagattgaaaaatataaatcaccaaaaccaaaggggagttttatgtcagtgagtccatgagagtataaatgaccacaatgacttaagaaatcctcatagaaggtaggcaagatggtttggtatataaaggatacttgctgtcaaatctgatttccagccctggagaccaatgagtgaagaagagaaccctcttctaccagccagttgtcctctgacctctgcacaacacacacacacacagggggggggggggagggagagagagagggggagagggagagggagagggagagggagagggagagggagagggagagggagagggagagggagagggagagggagagggagagggagagggagagggagagggagagggagagggaagtgtaagaaattcaaaagacatccaaatgggttgccagaaaaaaatgcagttacgtttgtatttgtaataaacaacactatttttgtacttcagaataaatagcaggacatctagctatactgatagttaattattgtttattcgaaattcacttttacctggacagcttgctaatttctttgacaagtctggcacgcttacatctgaggaaagtctaccattctaaaatctctctgcaacttgcctgaaatccagttaactcactttagcccttcagcttaatataaattgccatttgaaatacacacatatgtctgaggcatacatgagctgctcatgcatcaccgtaaattaatttaaagaaatttaaaaagactgatgactgatttcttctcaatatctaattttttttttgttaaagaaaattcctgtgaagcagctgtatgtgcaaaggttgtgaggctgactaaaactttaaaaactgtggagggtaagggatgttgctgaaccaggaagcttacttcaagtttccttggagctatctttttttttttttttttttttttttggagagtagattcttaaaacatccttaccacaatatatcctcccttcactcttcccatctcctccctacatcttctcccctgcatatccactccccctgcatttcttcttcagaaaagaactggccttcaagagagtacagaagaatgggacaaagcaagatacaataagacaaggcaaaagcccgcctatggaggctggaaagggcagcccaataggaagaaaagatccccaagagcaggtgaaagagtcagaaacatacgcactcccaccattaggaggtaccacaaagacaccaaactcacagccataacacataagcagaggacccagtaaggacctacccaaatatcatgccattttagtctctctgagcccctgtgagccctgcttagttgactccatgagccaatgtttatcctctctgactcctaccatctttacccacttcttctagttctgaggggttctcctagctttgaagagagagatccaatggagacctccaatttaacctctctctcaacacaatgttttactctaggtctctgcacctactcctttggggccatttttctaccttaaggagacactccttgctcaactctatatcagtcctaacatgttgataagcagattttaaaaaaataaataaacaacaacaacaacaaaaaaaaccaaacaaaatcactaccactacaacagcaaaacctttgtaatgtattaacaaaattttattcccaactaacggaagagctcagtagttatcagataacatctgaggcctatctgcctggctgcagtctgcttctctgatatacccaccaatgaattttaaaattaccttgattcatgacttttacttttctgctattatagaacttggtgaaacagtatccacattggaacatggaattagggtaacttagtaccctgtttgtaagccatggccactcaaatttggctccaaagtaaacaatctcttattccctttgaatggtatattagttgcttttctgctgctgtgataaaacactgtgaccaaggagagttacagaaaagggagtttattctagtttatggttccagagaattagagtccaagatggtggaatgaaaacaagggagatgaagaagtaactgagcgctcacatcttgagcaacaagcaggaatgacaagcattttttgtttgcttgcttgcttttggcaaaacaaaacaaacaaataagaagctctcaaagcccagtcccaggaacatacttatccaggaaggccatacctcttatgactccccgaggtccccaagtggagactaatcgttcaaatgcttgaggttgggaagtgtatctcacccaaatcttcaaaaggtgggagctctattttttgtatcaatgtttgccatgactaattcgggtctgaggatataggagatttggtttggttggtctggttttgaaaggggaagaacacaggattgtctgtgaaatgttaattcaaactcattttaacggttctgttcttataggattatcatgtgtcagggaatgctacattgaaaacatgagtttggagaaatgaaatgagatgtaagttaaaagatgtaaagtaggggatatatagggcggcaagtgtgagagcaaatgtgtaacatgaggacaatagttaatggaatggtgtcatagtcaagattttataaagagtacttagctggccttgtcaaaaaaagtacctatataaactgatagacacatttatctgtttcatgacagtgaacaattttaccattctgtacgtatccaataagatcatattgatgctttaaatgtacacagtaggaactacttgccatcaaagaaagaacaataagtatgacatgatagagcataagaaagctctttgactccataatttaacttgaaatatgaagccctcagaagtagagctgttgtagattatgagaaatgttataacaggggcaattgattttcataaacgatggagaaagtataataacctagtaaacaggtataatttattccatagtttgatttttttctaagaggatgatttctcttagaataagttctctttggagaatgggcagttattattattgatgtaataaaaataaaattactctgtgtttctggaggagaagatgaagaagaaaagggtgaagaaagaggaggaaggggaaaaggaggaggaggaggaaggggatggggggatggttacaaggggcaaaatgttcacagtgagtttatgggtctgtgccttttttttttttttgtccacatggaagtcttgttgtccacgttggaaatgcagatttctctctgctccagacataatggagatgaatgcctataagtaagagctctgtcattaaacatggatcagacattccccaggcacaatctaatagaaaagaaaaacagaaaaacagaaaggagtcagaatagggggatcaatctgaagaagagtggagtgaaacggtttggaaatcgaaaaggcaacacaaagaataatgacaggtcagagaaggtgacaggcttaaaagatacaaccaaataattccattttcatgactccatggtgaagatgaaagaagcagaagccgtttcaaaagctaagccaggcaagagacttgggcactgaccccaaggacagtctcacagcactcacaggtttcaagtccatctcagttcttggtgagacagtggtcttccattgcacaggtctgtggcagtgaaaattcctatttagtcactctatgggaaccagagtgtaggctctgaaagatcttgaaagtctattgctaaaaattgagctaagaatggaaggctacgaatttgggaaggagaacttaggagagcacaacatgggaggagttagaaagatgagaaggaaggggaactatgcaaatgcagtattcacctacatcattttcaatgaataaattttatttatttatttacttatttgaagggattaaaaacaacaacagaatcctgagataaacagggaaagaaagcgcgggggaaaaaccataaccctgagagtctggatttggcctgccacagacctagagtagaagaggcccaggaaggacaagatgtcccatggagagcaggatgcccgctgctgataaactacaggttcagttggaagggagctcagtttaggcaggaagtaagtgcataaggaaagaaagccctaccattagtatctgggaatagttctcatcaactgagagcaaaccttgtatggagaactgagtctgaaatcagtgggtagatgagcagcatgaaccatttctttgcctgatggccacagagcctgagaactcaagttccagccatgaaatacagagctatattctactagtaggctcattgataaacttagaagttcttgcatgcatgaagacaggctctccatctatctagaaaatgtcttctatggtcacttagcacatgcccagtgcacttgggagatacctcacagctaagacattggctatctcaggggatgcaatctggattgtctcagtggggtgacagcattttcccagcacacagacttaaaacctgtgtactctgatatacaaagggaagccaccaatctgaaaacaactctggtaaccagcagagagtgtccaacagagcatcaggaaacttaaactacaggcaagacatcagcccacagtttaaagggctatgatccccaccatgtcatgtaactggtaatctccaattttctaggacctagaaggaatccattccagcacttcgcacacacaccccttctttttaactctggggattcttcactttccctcttgtcattgttaagctgttagaggcacttttattgtagtcttaaaatttgtcttttattctcatcatttaattatctcattttgtttatgcatatttttcattattgggtaatcttgatttttttttcctttttagagtgcttcttcttattccttatccttttagaagtattctgatcttaccttttattattttaactggaatttttaaaaaaaattttttttctaacttcttaccctgtcctattcttctttatgatattcatctccacttggttcgttttttcctctttaagtggtcttcacatctctactcccttttctgtctccttccttatctctttcacttactgcatccacatttacctcaactaaagagtatgactagatcttgaatggtttgatgttggtgctgttagagcagtttgctctctccactctaactggaactggtgaccaaactctccagagtaagctgcttagccccatgtggtggaacataactgtggttgtagaaccgagggggctgaggcaggagcttagccccgtgtggtggaacataactgtagttgtagaaccgagggggctgaggcaggaggatcgggctttcaggtcacactttgctacatagtaagtttgcagccagcctccttgtgagatgtctccaaacacacagaaacaaaagaggaaaaggagaaaaaaatgactgaggtattcaatatgaaatactcaaataaaacttcaagagatgggacaaaacccaaaggtataagaagtgtagcagagaaactcaagaatgtgtcaaaggaaacagtatttcccccaaaaggtcataattctcggcttctcaaaagacatggagatttgttaacatctagatgaagacttcacaagtttatttgatcaatgaattccgagaggatacaaacaagcagatgaattcactcttgtatttgcggaggaaagtcaacaacacagaagaatatgacagtgggactgatgagcaaaactctaaggtacacagaaaatgtcagcaacatgaaagaaagattcagaaggaaaattgagtttttaggggttttttttgtttttgtttttaaatgaagaaaccaaaagaaaacaaacaagccattggaaaaccacacgacaaatgatttaatgaaggagaagaaggaatattactgaaacaacaaaaacccactaagagaacagacaataacaaagcaattttacaccaactaaaaaaagaaacaagtaacaaaattataggaattagtaaacatctctcaagaagaataacattatatgtatatagccagaactcactaattaacacagattggccacctagatgcctgtatgaagacaaattaacaacaacaaccacaataaaaacattgaccctgttactatctccaaaaaccacaccttatgggtaaagtcagccactgttggagaatgagacaatctaacaagtgagtgaaatctgaaaagaatttagctgtcctacatttaataaggtagacattaaaacaaattagacagaagacataaagaaggccaagtgagcaatgaaagggacaactaattaagatggtatattaattgaggcaggcatggtgtcacacacctagcacacggtagacagaagaggccaatctctgtgattttgaggccagtctcattaatagttccaaaacagagctacatggaaagactgcctcaaaaaggaaaaagagatggaggaggagaaaaaggaggagaaggaggaggaaggagaagaagaagaagaaggagaaggaggagaagaaggagaagaaggagaagaggaggaggaggaggaggaggaggaggaggaggaaggggaagagacaaaacaaccgtagatacacatcaaattttagaattcttaatttcataaaacactaatggagacaaaatttcagatacactcaaataataatagttgataattacaatatcatacaataatttttagatgcattactcaagctgaaggtcaataaagaaatttaaaatataaataggacaaaatgacttaaaggatatatagagaatattcaatccaacatatgtgtttataaaagatacacattgttctcagccgcctatggaagcttcctttaataggtaacatgctacatggcaaagcaagtcttaaccaatataaaagaatcaaaataattccttacgtcacgtcagatcacagaggaggaaaatgagaaatcaacagtatgagaaactacagaaaatacagaaatacattatactcttttgtatgtgtgtggtatatatgtgtgcatatgttcaagtgtatgtgtgtgtacacttgcatgtggatgtgtaagtccattcatgtggaggctagaggtcaaagtatgtgtgccaggggctctttcttagtctcttgctcagtttttaagacaagtctcttactaaacctgtggcttgttgatttggctagattggacgggccagcacattcccagcatttccctttctctgcctctgcaaagcttcagttacaggcatgtgctgcccctttagccatattatttagtgctgtggatatgaacacaggttctcttgcctcttagactttattgacagcctctaaaaaggatacttttgaataacaagttggacagtgagggagtcagagaggaagcttaaaaatggctggaatcacaagtaaaaacacaccctaagagaatctttggaatagaaaaagcagttctagaaggaaagtttgtagctctgagtggttatattaaaaactcagaaagagctgggcatggtggcgcacggctttaatcccagcactcgggaggcagaggcaggcagatttctgagttcgaggccggcctggtctacaaagtgagttccaggacagccagggctatacagagaaaccctgtctcgaaaaaaccaaaaaaaccaaaaaaccaaaaaataaaaaaacaaaaacccaaagctcagaaagatttctccacagtgagtcacaactggctaaggtatagagatgaagaacctgcagaattctcagcccaaagggaacataattactgtaacccccacccctcaaggcttagggatgaacacagaagagtctgtggtggtggatgccgaccacacgaagcattatcatctgaacactgcagaggcgctacacataggaactcagttctttttcggcggagtatacaggtatatatactgtatatagccagaccaaatcccagcagggagaagggagttgggcacaatcctagccaaactctggagtgattgacaattgttagctgcgagtatagtgtaacctctccttaggtgagtactctccagtagaagacaacacatcaaaaggctttgcaaggctaaaaagacaatgggtacaaagttacatggataaagaagtggtgttgaacccttctcaatagtcacaaataatataaaatatcttggcatgactctaactaaggaagtgaaagatctgtgtgataagaacttcaagtctctgaagaaagaaattaaagatctcagaagatggaaagaactcccatgctcatggattggcaggatcaacattgtaaaaatggctatcttgccaaaagcaatctacaaattcaatgcaatccccatcaaaattccaactcaattcttcaacgaattagaaagagcaatctgcaagttcatctggaataacaaaaaacctaggatagcaaaaactcttcttaaggataaaagaacctctggtggaatcaccatgcctgacctaaagctttattacagcgaaattgtgataaaaaccgcatggtactggtatagtgacagacaagtagaccaatggaacagaattgaagacccagaaatgaacccacacacctatggtcacttgatcttcgacaagggagctaaaaccatctagtggaagaaagacagcattttcaacaaatggtgctggcacaatgggtggtaattatgtagaagaatgcgaattgatccattcctatttccttgtatgaaggtcaaatctaagtggatcaaggaactccacataaaaccagagacactgaaacttatagaggagaaagtggggaaaagcctcgaagatatgggcacaggagaaaaattcttgaatagaccagcaatggcttgtgctgtaagatcgagaattgacaaatgggacctcatgaaactgcaaagcttctgcaaggcaaaagacaccgtcaataagataaaaaggccaccaacagattgggaaatgatctttatctatcccaaattggataggggactaatatccaatatatataaagaactcaagaaggtggactccagaaaatcaaataaccccattaaaaatggggctcagagctaaacaaagaattctcacctgaggaataccaaatggctgagaaacacctgaaaaaatgttcagcatccttaatcatcagagaaatgcaaatcaaaacaaccctgagattccacttcacaccagtcagaatggctaagatcaaaaattcaggtgacagcagatgctggcgaggatgtggagaaagaggaacactccttcattgttggtgggattgcaagcttgtacaaccactctggaaatcagtctggcgattcctcagaaaattggacatagtactaccggaggatcccacaatacctctcctgggcatatatccagaagatgtcccaactggtaagaaggacacatgctccactatgttcatagcagccttatttataatagccagaagctggaaagaacccagatgcccctcaacagaggaatggatacagaaaatgtggtacatttacacaatggagtactactcagctattaaaaagaatgaattcataaaattcctaggcaaatggttggacctggagggcatcatcctgagtgaggtaacacaatcacaaaagaactcaaatgatatgtactcactgataagtggatattagcccagaaacttagtatacccgagatgtaagagacaatttgtaaaacacatgaaactgaagaagaacgaagaccaaagtgtggacactttgccccttcttagaattggaaacaatcacccatggaaggagttacagagacaaagtttggagctgagacaaaaggatggaccatctagagactgcatcatagagatgccagggatccatcccataattagcctccaaacgctgacaccattgcatacactagcaagagtttgctgaaaggatcctgatatagctgtctcttgtgagactaggccggggcctagcaaacacataagtggatgctcacagtcagctattggatggatcatagggcccccagtggaggaactagagaaagtatccaaggagctaaagagatctgcaaccctgtaggtgcaacaacattatgaactaaccagtaccccggagctcttgactctagctgcatatgaattaaaagatggcttagtaggccatcactggaaagagaggcccattggacattcaaactttatatgccccagtacaggggaacgccagggccaaaaagtgggaatgggtgggtaggggagtgagggggagggtatgggggatttttgggatagcattggaaatgtaattgaggaaaatacgtaataaaaataatgtaaaaaaaaaagaaatggtgttgacttacaaagagccaagagaggagtcaaatatggtcaaaccacattattttgcagttctcaaagaagtaataaaaaaaatcgaacacatttcctaatattgtacatcaagcacttacaaaagtaagaacaaatcatatgccctaacaagaaacaataataatcagtgtgaaaattagagagaagcttaaaagcaatacataaaattaataaaacactgggataatcctttttaaaattaaaattgacaaagataaagaaagagaagattcagattagcaaaattataaatgaaaaagggaaggccatttcagtttctaacacaatttaaagaagcattagagaatattttaaaaagctgtactctgaaacctggcttctaattttagcagaaacctcacatagggtctccaaagccaactctgagcctggttggtaaagctttctgtccttgctagtcagtttcttatcattaagcaatctgggattcaaagactttagcagtgaatatttccacttcagtggttgtcttagtcactgttctattgctgtgaagagacaccatgatcaaggcaactcttataaaaggaagcttttaattgggggcttgcttacagtttcagagtcccttatcatcatggcagggagcctagcagcaggcagacaggcaaggcactgaagtggtagctgagagctacatcctgatttacaagctggagtcagagggagaaaagaaagaggggaagggagcaagggagggagagagagagacagagagagacagagagacagagagagacagatatatatatatatatatatatatatatatatatatatatatatatatatagagagagagagagagagagagagagagagaaagagagagacagacagacagacagacagacagagaatgagagttttgaaacctcaaatctcagccccagatcacaaatcctacaacaaggccacacctcctaatccttcccagtagtctaccaactggaaaccaagcttacgaacctctgggaccattctcattccaatccccacaaagggcttccaccttgttaattttactatcaacgaaattgacttttgactttgacaattgattttgtatacaaagaaactctagaaaagaaagaaaacgttaagtcataccactaaggatcaggaggcagccctggacagccgccacagcagaaaggctggcccttctatgtttctgtgaatcatagcatatgcgcttgtaagaagtgaaggatatttctccattcaattttatacatgacaaaaaatattcctaccaaatgtgaagtggcaagtatgaatttagtgtttagttctccttaaacagtcaccagaccttgaggtcttcctcaggttaccacagcttgtagcattcattaagcagaatggaggaattttattataaaatgtaactaatgtattatatgttattatcattacaaacccttgtatgtaacccagagagggaatacacactatggatctgctccaactttttaataagtaaattttagttaaagtctatttaaagcaaactcctaagacattaaccagctcccaagagctgactactacatgttatgttagcttgtccatggtgctatttgttactcttacaggatttctctgtgtagccctggctgtcctggaactcactctgtagaccaggctggcctcgaactcagaaattcgcctgcctctgcttcctaagtgctgggattaaaggcgtgcatcaccacgcccagctactatttgttattcttaaatagctaaccacagcataaaattttattttcctaaaatttacatttaaaagccatccaacttaccaaagtgatttcaaaccacaattacattttatctcaactaccagcattttatttagccaggatctacatgagacacatatcatgatgtgctatgtacatcttgttatacagtgttatattgataacaaatgtcatcaatataacattgaattaatcttccataatttatggggaaaaaaggagcagccttactgaagggcaaagttatacaacagctttacagaagctgcatgcgagtgcagtaccgggacacgggcacggacggcggcactataaccattttccgtggtggtaatcttgctttcatctgacacagaaaagagaccgccgttttgaaaactcacagaactagcctcacggttttgtgagtccattgagcgctggctgcgaagaacggtgtttaactcgagaaatcattgaacaagttttagaaaataaagatgcttatgacaatttcaaacttgaaggtctccaaagaaggactgagatattggtgagaggagtaaagagaatcctggtgcatttatttcatgcttccttctgttcgaagatcattttgaggtttataaaaggtggggtgatccaaaaatctccaggctgagagtcctggctgaggctgtgaactgggctgcagagaaagggccacgcctccctcctctgctcgcattactcagcagcttttctgcatgtggctggctgcagacaatctaaacccttccgctgtcgctccccccttatactgttctgccaaaaggaaggcagagaggaaatcagctacggggcaaagactgaatagtgaacacatacagcaatgtccagcgagttacctcctgtgtcttatttatttatttatttatttatttatttatttatttattttctctaccgattcgctaaaatcataaagagaatgcttctgtctgacatcttggaccaaaatgcttcccatactgcactctgtaacttttcaattgaatattaataactaaatggatttataatccattatttccctttggtcacctactcatcacggactaaacgaaagggcaatgccattatcttcctggcccaactcttaacatacgtgtcattgccaaatcaaaggaaaccttaccactgagcaattcacagaacttcgcttagctaatatgcttaaggaatctgagaatgtcctactaaattttaattgaatgaagaccttttagaagaatttcttctgtagataaataaacctagagctaagaaaggaaagctacatctacaggctccatctcaaagctatctatatctgtagtcagttttcagggttcctacatagagaataagtatgtgttgaaaaaatactacactagtaagcagcctttacatcagtggttctcaccctgtaggtggaaatccttttgggattagaatgacagttttacagaggtcacctaagactatgaaaaacatagatacttacactatgattcataatagtagcaaaattacaattattaagtagcaatagaaagaattttagagttgggagtcatcgccacatgaggaactgtgctaaggggttgcagcatttggcaggctgagaaccactgctttatactaccaaaattttggaagaaagggagtgagttcattcatggccaagtacaattgctaaagatggagccaagattaaactgatctaagcaagagaaggaagtatttctgtcttggagtcttagcttctcagtcatggacattccttgatggtatctttccacttagaatatttagggttctgaaccctatttctgaatgcgatttcttgacttttcttggcttcaattccatcacttctgaagtctataaatactagagccctatatagccctctactcctttaaaatactgtcctcaatggtcgcttgcacacagaaaactctacataggccacgtgactcttagcttagttagctgagaaaatcaggaactctttctgagcaacactaaattgggctgagaatgagtcagaaaagtcaaggaaacatgaactcaaagtcatctagagttgaattctgggaagtgaagcttagagcaagcaaaggaccataacaacaaaagagaggcctaaataaatagatagataggtagataggtagatagatagatagatagatagatagatagatagatagatagatagatagatagatagatagatagataaagcaaagcaattgtcgagtcaccaggataaagaataggttcatctgcttatgtggccaaattctcaggggcacttctgcctctgccttagtcgtatttcggctcttggctctctgattgtatgcccactattaatgcaccaattacttatattaagttgaaataagctcttaatataagtcttctgtggcccaaacataatgtgaaaatcattttcatgtcacactttaattactcataattctatctttgtttctttttatttgtgagacacagtcttgctctgtaacctaacggcctgtaatccactttatagtctaacctggtcttttatcaccctgcctcattttcctggtgctgggattacaggcatgagtcacaaagctgggtagattcttcaggggtttttttttttttctttgtattttttaatttattttctggcaatctcactcgtgtccattatgtgtgttgatcattttttatcatcctgttcgcccacacccaatgaacttcttattcctaatacattctttcctagtttcatgtctctttgttggaaggtcacagactgagtgtaattaaagctgtttccatgaacacggcattttgtggaggatggttactggagcatggacaactgacaagtggcttcagcattgaatgaaatacctgctttaccacagtggcacttaagtgcatgctgatggcccccttgggtgagggtggacctcctaccatatgtcattaaatatcatgggctccatcttgtgtaactaaccatagccattgtgacttggctatagcagagtcatatccaggaaacaaggttttcagaactccttttatgttatttctttcctaggagtcgttgctcatagaggccccagtggcaggcccataaaacagtaggagctatagccatcgcctttgcttgctcattagaagtggatgataggaccctgttgctgaagagattgcagtcttcggttacagaaaatagagaaatcgaggcgggactgacctagaagcttcctcccttttgcttagcatttatagtcccagaaagtgcttttgtaagctgctagtgaagaaagtgatcaatggcctaaatcacttgtgaccaacctaccaggacaatgtacctactggtgcaataatcacagggctgattattatgagggtaaccaactggtctttgattgtatctgaagcctgcttcacaagatggattcatgcctatcactgttaagactggtcctaagcctatggccagggaattcataggtactaatgagggagttagaactgttgctttgctaaatgccatgctgtcaaattacttcccaaatacgtttgtttatgcccatagatagtgctgctctcaacctcggctagagaatcttcatcttgtaatgggcaaaggttaatatggtcactcataaataaccatttcttttagagtaaatgactttgagtgctcacccctaaatgaatcatctctaccactttctgagtggctcatggaacatggtagaaggatttctatgtttttactatagagaataataaaaaagttcaacaaaatgaaatattataaatacttgagtgatttgccctatggtataataatttttcaatacttgttttaagtctggaaagtgctcttctactgatttaaattactgttttaagtactgaaactaaataatggcacatacatatggatgacatgtggaaacaatttgcatactgagtaaaaatattaataaaataacataaagtggaaaatcactcatcttttaaaactggggatattgctaaatatagattgtgtgtttaggaagcccagagctgtgggcctgatccttagagccacattataaataaagttaaagtaaaaaaacaaaacctagacattcagtagggagatgttttaaaaccttggtgaccttgtaggtatctttcaaaaattgtatcatcccaattattcatattaagaatattttttaaagtgccacaggtaaaaaatcttttcttaaaaaaagcctttaacataatctctagaatttggatcaacaacattgctgagatattaaagtttcatggtacaaattatgacagaaaagtttgaccaaaaataaagcagccattgttgctacagtttaagtgtaagaatacaatagaatgggtcttggagagtgactgaattttacagttttataatcttttctaatgaagtacacaccttgtaatcattcaataatttgaacagttcataatattgtttaaccaatttagactgcaaagacctcggtctgacagagcaagtcttgacctgcttaacattatgttatgctagtcattttaaaatgagtctttatttcccatagaaggtcagtttttttacattattatataatcttttgacagaataacaaataacattctgaatgtctcatttctaaatacaaaacatcttagtataaaattatgcattgttttaaatgcttggaagtaggtccacatgtagaaaacaaagtacgtatgataaaaaatatcaaaattgtatattcagcaggcatattattagaaattgtaccacccggtgatttattagttactaggaaaactgtagagctaaaccaaaaagtaatcattaaataacaatcaatgagtcaaccaattgttaaagaaccaaatctataggcacatatatattacaaggcatggggtaaacagagatttgcagtgtgctctccttcagttatgaactgtactgcataggctgagggatcaatctatggcatgccatgcctcttcactttccccatcagctgtaaggaagcacaaaggcgaatccgggccagcaaagaataatgcttgagcatttgacatttcaccacttcctgtagcttgcatgcgttttattacactctttgacacaatatttgattttacaagttggatcaagttgtttagtcagcaaaacaggaataagcaaatgagattctacctgcctacaatttccgttcatctccagccgtctgtctgtccaccggaatgaaaactggagcatactcacatcacaaggggcacatgcatcagcgtgaatgaagctaccatacctccctttggtttcctcatctccaaaatggaatctccttttcagtattttatctttactgatttatcataagagctgtatgattcttaccttttttgtttacttagcagagacatcagaatagtagaaggaagatgaacaatgagataatgctgattttgtatacaaagtacaactcttagtaaaaaatgttgttgctttcagtggtataacaatgttattaaagtttttaatccatgtctggcttttttgttgttgtttacttttatctgtctggggagtcttgctatgtgacagacttgtttagatctgactatgtgtccagtctggcactgaactgaacagtgattcccttggtcctcttacctcgaaccctaagtagtcagagtttacatttgaggcaccataccaggatttgcgtttgacttcatacacataactttaacattttaagatggggaaatgcaacaaaatatgttcttttcataagaagagagtttatagctctcctattcctgtcattaaatggaaataatgttttgttgatgatttattaagcaaacacgattgatggttccttcaagtttgtgactggcgtctcaactgtgttattatttgtagtagttcttgaattaaagtgtatcagtctacggatgacattccaatcttccctacctcgatggaccagtttataaatttgaaggctgatctgtttcatgttcctacttttccctgaaagtattcatacctttttacgacataccacttacgcatttgcttttcatttcaacattctgactaatggtacttattaaacagctacagtctggttcaattcctgaagatgttagtacatcgcccctggatctcatagagttgttactaaccaagtagaacctcacagatacgcctgggacagtcctaacacagagaccaatagttatagaaaatcaaactcaggtttgtcacgagggctctaagaatctttattgtaccctccagctttggttcattgctaatacatgctttataggcaaccataactccctaaagaaacatacatagagtggtatccaataaaattaaagtttttcaaagaggtcctttcctcaccaaagcctgtggacagccagtgtgcatggctaccatcagtcgccactgatgattccccttgtctcatggagcattctcccctggtttctgatgaaaaagttgcgaatgggtgagagaccatgcctcttaaaagcataggtagatatatgatagctgatcaatagataagtagatgatatattgatagacaacagccttcctaaagtgtggctaagcactatttattacttctgtcttggtccacatgtttatttactttatctcacaaggaaatgaaattgatccgacaccacctccactcacaagttatcctggcttttactctgtgctgttctggatgactgtcaatgtaaatacatgaggtttgtgttgattttgttttgtttttgtttttttttttctttagaagaaattttaagatattggatgaagatgaaagtcgtaaggctatttaacctcttttctcaaggagaatattccaaattttccttttcctagagttagatattaacttttaaaaattccattaaccatttagatataaatctcaacatcttacattcattttatatatttttaaaaatcggcaaatgaatgacaattacattttgcttgtattttaaaattcttctgtctacttttggcctagaagaaaatgccagcttttagaaatcttttgtatcacatccattaatccctgttaacttgctccctctaaatactagtgtttgtaaaccttttcaggtatctccagatagctggtctaaacaggaatcgtttaaaacctttcatatgtaagattatcatattatcctcaattggaaatacagactgtaaaaactatttaagatatacaaagcccttacattcagttcttgattttaagtagtcttttagagtaccagtagattagaaaatacttattgctaatgaagtgctctgtagaaatatttgtgttcaattcacattatttacattgcttttctctcaactgttttttattataatttatgatgtgaatgatagtgtattcacatgtacatatatgtttattaggggtagggtagagttaccatcaaggtagagaataacatcttttcagttagtgatttagtacttgtaaaacttcgtattcaataaaactgcattaatcactatcattattagtctataagcttatttatatattttactcttgaaaccatttactagcaaactacttttccattatacattttaagaagttgacattttagcagtgctatcatttttttactcataaaataaaaagcaggatgtaataatgtcaaaaattggaatgactgtatgcctaaatgtcactcagcatggataaccattaaattgacacacccatctacctaagaaagtattgaggtgattaaaccaataacatgaaaatattgacactttaaatgtagaacatacggaaaaatgatgttactgagtcaatgcatatttataatgaaggatttcacttaagactgaagagttgcattacactctgcaatatatttgttgatttaaagataaattattaagattaaatataacaatttatgtaattccaaatattttatcattcatagtaaaagatactttttagtatccagaagccattgaattgtagagacatgttttgtttgttaagtccgagcaaaattatttgataacgtaccattttaaatatatattgtgcccatagaaattaggcactgagaaagtaatactcaacgaatgaaatttcagtgatttttttttttagagctatctattttgtaggccatgcagggcttgtatacatggcctggtttaataatattaaaaaaatgaagcagtttgaagaactgcttaccatgttgggttgggatacgtaagagtctatgtgagtgtgtgagtgagcgtatgtgtgtgtgtgtgtatgtatgtgaaacacacaacttctgctttgaagaaagacacggtctattaggagagacacactggacattatttgcgatggttgattttaatgtcaacttgccacaaattcacatcctctgagtgggaagcaccaactgaagaatggtcctggtcaccttaattgatgtggggaaacccaccccgggtgtgggtagcagattctggtagccatctagataaagagagacttagtggaaggaagcttattcacagcttgctgacctttcctcttgctgttgagtttactgaccatctggtttctgcagctgactcctttattgatgatcaggaccagtggtacccaaatacctagcttccaccatcgactaaggtctaggtaccttccagataccttccatgttttggccactatatggagactgctgaggcacccagccttgtggatggagcaactactgcattgccagccttcccagtgtgagacagccactgtggaagtaatgtgattgctaaagtagccttaagaaccaagcaataacaggttctgaggctctctggtgtgagctagttgttatttctattttaatataaactgtataaactgagtaaattatacacacacacacacacacacacacacaggcttttgaaacacagaaatacagatgaggatgtgattaatgattaattcctccaggacactgggagaggaaaatgttgctaagaagcttcctcggtaggcttgaactcaagggcaagacagtatactaggaagcaaaggaaagggctgtgggtataggaggcatgtaaaattaatataatgttttgatatttaggagaaaattgcaaaacaaaatgatgacagtgtttgaaagtgtttgatcagtgccaagcatcactttatgtacttggcaaacatgacttgaggccttaagctgtgatttgcaaatgtagattggaatcaagatctttatagatgaggaagcaaaaatcagaagacaaaataacattatcaacttgatctcatgtgcagccagggctgaactgcaaatgctgatttgccccagtctgggctcctcaaatcgttccttggaatcctattagttggaactttatctctgctcgtggcagggtgcctgggaccatgtttataaatatctgctgaatgaagaataagtgagtcaatcgaaccagaactcactttggttagttaatttcattcgtggtatttatggagagcagaagaaagaattccagagacacgatttgtcaaaactctctaaagaaaatgatgacactatatattgatgaaaatgaatgttcttgttcttgctttatttgattttcttgtccccccactccccatctgctagggtctcattacagcatagttcttgaatatcccaggttgacctgaagttacaatatattcttgatttagatggcagacattgggaatattttgactcttaaaatttaatagctaatctttgaagaaaattaaaatagtgatctccattttgtagacaagaaagacaaggaagagagaattttacaaagagatagcgaacaccatataacgtcatagcataatctagtttgggaagaacggagggccctgaagcaccatggtgtttgccagtaatcactgtattggatgtgtcatgctgaaatgcaatacaattaggctggcataaaagctaacttcacatgaagaaatagagactttgagaaatctcttctgaagaagcttgtctatgtgtagaaggatgagacgttattgagcccagtgggaggctttatcaggaaggggtagatgtcttatatactggagaaaaaaaatgctgtaaaactaatcaaaatcctggaatagagagtggacatgaagactggggtacagggagcccatgaggaagaaggagctgcttcaaaactcaaagacatggtgttctaccttcctacaacgtgtcttcatctgtaaatcagggtttaaatttgataaggcagaaaacagtcacaagactatggtctgcgtccatccaatcagctttaaggttcaattcagccctatatcttttctatatctgatcatttcccttcaaggtattcccacttaaaagcagagtagggtacatattatcaatggatttatgattcttggtcaacagttcaacagaggtttctttctttatctctttgttcttttgtttttttctttgtttctttctgtctttgtctgtctgtcttctcttcctccttccctcttttccttccttccttccttccttccttccttccttccttccttccttccttccttccttccttccccccttcccttcccccttcccttccccttcccttcccccttcccttcccccttcccttcccccttcccttcccccttcccttcccccttcccttcccttcccccttcccccttcctccttcccttcccttcccttcccttcccttcccttcccttcccttcccttcccttcccttcccttcccttcccttccctccctccttccttccttctttctttctcattaaggtttgaaataaattggccacttagtcttgcctctgtagataaggaagcacagtgctgcttgtgtgcaggtaaacaataacaccagcaccctgaaaaagtatttcccaaggaataaaaacaactccaaagactttatctgtgggagagtaattctgatagaaaattagataatttctcagcttatgtgtgatgttttaaaagacctcaagttaagtcctaagagaaacagtttttatcttatgcccaactcacatggaaatgcccttagcaatggtatttatagtatccaaaatgtacaattcacaaatgtatcatcaatagatggtgacggttaaacaagatgacacttagactagagaatgagtggaaaataatgtatgtgacacaagttggataaatctcaaaaacattttaggtagaataatggattatacaataggacataatgaatagttctgttatgaaatgtctagagacagcaaatgttcaggggcagaaggtaaaaatccagattgccttggattgaatggaagtcgatatttggtatttttgatacttgatgtacatgttttaaaatgattgcaatgatgtttttacaactctaattgtatttaaaagcactgaactacaaaaagataataaaatgattcttacatatcttcaaaatttcattcatttctctttttatgaatttaattatattattactggtgtgtgtgtatatgtgtgtgtgtgtgtgttacacatatgtgtgaactatggtgcactcatgccatgatgtatgtttgtaaaaggcagaggacaactttcagagatggcctctcagatccttgcagtataggttccattgacttcactcaaggtgttaggattgcatagcagtggttgctcagccatccttctggtattctttcttgttttagaattgtaatgtcttaattatttttctactcagttacattagttaacagcaaataagagaatgaatgatgaggaaattatttattactatgccaaacttcctgtttcacttggagccccaatattatgaatactattacagtggcctaaagagtgttattggttcagtgtcttaactgatttgttaaaatgactactttaaatgtgaatcatagatataatgctaaatataattttagaagaggcctctataatatgacatataagacagtcaactgttcttttgactaggagtcctcaacttcaaatcgcacaagctaagaaagtgcagaagatgaggattccagtgagctgacggggtggttcaatactttttccaaggatttacactctgtggttccatcagcaccaatgttagctgaccaggatggctgcggctcaagagtgtgacatctagagaggctgcagcagtaataaggaagacctttatttccccttgtggcgtttgcccaggtgagaagtgttcttccagaagcctgactgcagattgccctcatatttcattaatgaggtcaggagcccaacacttattcaatccctggcaagagcaatgaactcgcaaacaagccctcccctggaatttttatgaaattaaccaatttcctaggtcttctggatatataacccagaggggagagccatacagaattacagtcctactttagacagatgctatctattctattactaatgtaggaaagaaaggcaaggtcacttaaatgtccctgaactcaccactaatcaaggtcatacagatgaacttgaacatagcattattttttaaaagccatgaaatttaagattatctctaacttagagttacatattataattatatttaataaaatatatatcattgacggtggatataaaggactaccgtttcatttaaactaataattatagtaatttttaatattacagagttgccagctctaaatgggatgtgtccttggagctcagagaaccctttggaagaggaggtagaaagggtgtaagagtcaggaatggagatcagcaggagaacacagctctgtgaatcaactcagcaaagctcatacaaactcatagagactgaagcagcaagcacagggtgtgcatgggtgtataccaggtcctctgtgtgtatatatatgtgtgtgtgtgtattatatatatgtgtatatatgatatatatgtgtgtgtaatatatactatatatacacatatatatcacagctttcagtttagtatttctatgggactcctgcgtgtgaatgagtggacctctgattcttaaacctactcttgtggctttttatcttctgtttgtttgccttgtccagttttgacgtgatgatttttatttcatcatattgtatgttttattttgttatgccttagaagcctgttcttttctaatgacaggcagaaacggaatggatccagattgaagtggagaggaactgggatgcggaaagaaagaatctgtttataataaaagagaaaatactacgttagtctgctttaatatacaatgtggttcttagatcgcaagaaaaatattaatggcacttttgccttaggggagagcaaactttcaacaatacatatttgaagaataaataacaatttgggaaacgctttactatccctcttctgaatctaatattatgcaatatgttatgaaagagaaattctaatggatattttaaatcccttaaaaatgttcagctgaagagtccagtgttagttgctgctagaaaaaaagttaaaaacatgagaaatcaattagacactgtaattctacaggttattactgatgatgtaaaaatcattttgtctctcttcttgaaagttgaaaaggtgaagtagtttaatgaactataacatatgttttggataaatggtggcagagtgaaagaaagtgtcaggcaagtcctatgtgtgcttttcagccaaggagaaccaagcacaagagaggggtggagaatggtcttaaccccagtctacgcccaagcccttctcgttttatcttgtagatgctaaaaagatgttgttggagttccgttgtctcagcaaaagcacagatttggagttgtatttcatatttctttaaaaaatatttatgaatgtagtgttctgcctgaatgtatacctgcaggccagaaggcacatcagatctcattatagacagttgtgagccaccatgtggttgctgggaattgagggaattgaactcctgatctctggaagagcagtcactgcttttaatcaccaagccttctatccagcccatgtttgatatttttaaagtaattgacattttaaactttctctcaaaagtcatgatctgacaaattttccatgacgataggagtgattttataaatttaaaactattagtaaaaatgttttaacattatattattttttctgatggcactaaaaatatttgaatatatggcacatggcatatattgaaaacatcataaaatcctattacacaaaaggaataatgtagagtaaaatactaaatattaagcaatacccatgattaatatggagaataagaaattatgagatcatgaatattattttcttctttatgcatttacaaatgctctgtttttataatagcattataagtagtaaatttataactatgaaaataattgggttattaagagttggctccaagccaacatcaatggatgtctgaaaaatgtaaaagaagaaattaaaattttgagatagtgaattaagtcataagagctgcagattgtcacttgagaaaaatgtcagaataaattagaagaaagatatactgatgggagtgtatctgagtgatataatcagaatctgtgtgaaataatataaaattattatatgcttttcaggtatattttatataatggtatttataaaacatccttaaattatagatttagtaaatatgtaagaataatgtaaaacttcttattttggtttcatttaacttacttctgttgggcaattactgaacatacaaagttgaaacagacagtggtgacagtaccttgtcacacacaagatactaactacatcacactgcaaagaaggtatggagggaaagacaagcagacaccacacagtgcatacagttggtgctgtgatggaagtccacactgggcctaggcacatctcagaaggaaagtgactcctactgaggggaaggagaggtcatgatgtcacagagaatgaacaagtttcgaaggcttggaagcagcttcaataactcacagacacatttacttctacaggatagataggccacagggtaagaggtaaacctagacagctcatggaagccagtcatcttgcattggatttttaaaccctgacgccacatttaaataatggaagatttttgttgctgttgctgttgttgccattggtggtgtttgctttgagatagcatatcactttttagcccaggatggcctcaaaattcatagtgatcttcttgctgaaggtgttctagcaggctctggcatggcaaacagtacacacaggtttgcactttcacatcttttcttctccctttccccaaggtctattccctcatttggctactgattcattcctgagatgaaacaccgagggccaactataagaattaattatttggctaatatgtccagtcaggatttactaattcactccagcacatatttccccctttcccctttaaaagctcaatcatgaagaagcatccccttgcttcttttgccccttgctctctgatttcttttgctttcttacttgctgctatgttgccttagcagcagcttgaccatctcccttcccccgcagccccacattgcccccacctgctcctcctagttaataattcggtgtactgagaatttggtttaagagtgccgacctccctttcagtgatgctatgacttggatcaggactcgtttctaggacccccgatccagttctcctaatggccattcatttcatctcacagcagcttattggtgaggtttctcttactacccatcctaaaccttccccgaatcatcggatgattactgttgaatgtctagcatccctgctctgtcttgcgcaggtggggagaatgcatctccccacataccccagccttcagtggccaaggtggacttccttggatggtcttcaggcacatcccatttcattcagcttggtttggatggcagttgtctttttcacttttggttgctatccgtttctaaccatctgaaaattctatcgacaagctccagatttctcctcagtccactgtgccttccccttggtgatggagcttgggtgacgacccctcctcactgaggctcttatgagccaggagatatcttcagctctccactctggctcaaggccaccactagcaaaggaaactgactctctctgtactgactgaaaactccagcacacacctaaagttactgatgcatcccaccactcaaagaacggcccttctattccctataagaataaacaaaatgacaatatttacagagttggagtattccaggcatgtcccatcacactaggctcgacagcctaagtaaaatgtgcatgttagcgctgatgggaacatagaggtcagctgctcactgagaaacaggagaaaggagatgagttagatcaatagaaaatgcttacattcattccagtaaggaatgataaaagtttaaatgaacattcacaatttgctgacttacttcacaacacgtttactaaagcttagcaaagtgataatatgcacagatccttttattgtagcaggaaactttaaaactaatataatgcgataaatattttatccgtgtagcataaattaaagggactcaattgcctgcatcttaatctcgattagtgcctgttaatagcaaaacacacacaattaattgtactttaaaagcagatcagttatcaaactcagccttagaataaaaattttgatcttcaaatttgtttatgtagttaatatcattattgttagttttggtgccagggatataacccaggggtacacagtatgtgctaagcaatggcttagcccctagcatgtacatttttactatggttgaggaaccattaaagctttagcatcaatgaattaaatgcattgctattagaaattagagaaatcttaaagcattaaatatcaaaattgtgtgaacatcaatcataaacaaatgctaactaagttactttttaatggaaaatgaccatgtttctagagaaaaggacttacgtggcatgggtttttataattttataaattttcaaatatctaacctaatatctagattcttttacatttaacagattttaatttatatttagatggagaatatgaaaaacagttggtcttgcagaaaggtgtgtggaaacctgaaatagcgatttcatgtaagtataaatatttctccttcctggtaggccacattagataaataggtcagagtcatatccgcaaacccactgtactctgacctatgcaattcattggcttattgtgcacagttaggtgatttactatccacaaagatatatgtcataagcatggcccatttatagattgttagctgactgtgctatataaagtttaaatttttacagcctctcctcattagtctgtcaacatcactgctagtcacatctggaaatccttcatatttaaaatgctgctcaattcctggtggcagaaaagtgttccagtattctaatggtcatttttgtcacgggcaatacatatttacaattactttttactccttgacatggctcgatcacttctctcatttttgaaaatgacttaaaatgtaagctggaatggtctgcacctgtctacctgctacattttccaaggcgtgatagtgttcaatggaaatggaatcagtccagctggtaactcacacagctgtgcaggtgtgttttggggatgatattggggcaccaaacaaacaaaaaaacgaacaaacaagatgagccctggggctccagatgaaatagttttgcagcatcatcaaacagactcctttaagggaattggattttcattttatagattattatttttcctaggagcaaatggctgtgaaaaatttaacaattcttcataccactgccttactaaggattaacattgagaaatataaattgtttttgtaaatataaataaccatcaacagtgaaaggaaggaagagtgcttttatatgactataaagacagttgggatatgatggatgcctaaacgttttcaaggaaatgcaccaaagttatggggtaagataaaaaataactgcaaaagttatttttaagactgttctagtcttgatggggtggacacatttttgagagcatcaaagactaaacactgagttgataacatgactgaatgttttttgttttttgttttttgtttttgtttttgttttaaataaatgtcacaatatggcgacaagattaaaagtgaagagtatgcgagagtagagagtcaacaaagtcatagtgacaaaggagaggtggctaattggtgagcaggtaaggtttctctctggaggagaagctgctggagtttgtcactttgttactctacagtgttgcctggagttcgatacttcattactctatagtggggtgaagaagttcaccttcttattttcatttccttccctcaatgatttcttcagagctagctcttaccagctagaaattcttcaaacgacactcgtgccttccttcacacaggttgaactatttgtctctaatgccctaaagtactggtgttcaatcttccaggcacttccaatgatctgaaatctgacctgcttaggtcagctggctctgagattatggtattctagtcctcaaaccaacctgttggctcgttggttttgtaccaaacacactgacttacatagctcaaaataccactggccttttaaaaatggcatatcacattccaggggaggatcaaaactgctggctggtgatatttgtcaagtctctcaaagttgcactttccaggattttcaattcactgaattcttagacagacatgtttatgtgaaagaattctttatatattttttctcctctttgagtgggcaaatgaaaatcttgacctctgggttccttattttatttgactctctgtagtatttaaatcttaaaattttccttaaaataatctaagtatggatattaatccatgatattaacgatcgatccttgtttacagggtgcctttccctgctcctaccaggcgatttcatattttcaaggatcagttcttgaaagaggatgtagccctcgctctgccaatggctctggctcagcctcatgcatctgcctttgctatagtctcaccggaacattgacatagattgattttgccaatgtgatcagttgagttctacacagtttaaaaatgtcatgttctggcttagtgtttagtggtgttctttgttcatttatcgtttactatctttagtttttttagtgtatactcattttttcccctactaaaacccatagccaataatagacattccataagtacaagtaaatttcctgaaaattttctgaagtctgactggagacattaggttacaaaattacacaatttcaagtttcttatatcaaatctaatcttgtatcacatttctttccaaaatttccatttttacaattttgctaaaacagcaaattaatatattaaatatggactaatttaattaatattctaggtgataaaatattaaaatatttggctattttctcatttatctcctggtcactattttgattatgtaatgcttatccttataaattgatttgccaagttccatttgataaataatgtgttctaacatctatatttaattttttaatgttaaggattaagtttggggtctcacacatactggacaagtgctctaccattgaacctattttaacttttaaaacagtgtgttcttatttcaaaaatattttctgccattacaaactaaagaatttagaaacaaatcaataaaatgggaaaaactgcacaactaaattgttagtactaatgcttattgtgcaatgttttaaagttatgttatttccttatggtttttattttagatctacataatgaacattctctactttattaaaaggagaaaaataattctgactttaaacaaattataacaagaaaatagaaattataattgcatatagcagactctaccaattctaacactagttttattcattttttttttaggggaaacaaacatttgtatctttttgggatttgtgctattgtatcctcagcaactttgtacagaattaaatgttatttgatatgttacattcaatggccctgtaatatctttttgtttacatagattatgatttaacatagtatatgtaaactgttttaagtttcatcgggttgcaatgttttttcctacataggaatcttttggtagaagtgacagttgaaggtccagattattattaattaaaatgattggatggatagtccaaacttatcagccagacgctgatttgttagaactgtaattccaaatctgtaccacaaacagcaagagagaacagttagctggtttgttttaggagattacagcatcggaagtccaaccttgggccaactacttttactgcttgcttcattcctgccattttctggtgcaaatgttgggctctaggctgcaacattttcccaagacattgcactttgtttaaatgagcctgacccagtttctattgcttatagaaacactttggaattgatcgttttatttataaaattgtccataagctcctaagttttgcatccatcttggttcctcttgtaattaaaatgagtaaaagccttaatgcttagcacagatggtggctctaaatatgcattcacttctccacatcatgttatttatgctgcttctttaaatataatggtaattagctaattacaacattagcatatcaacatatgcccacactactccttattgtgggagaagggtatggatgacgaaaatccatccttaatacaattttaatcatgtcatcagcaacaaaaaaagactgaattgatattcagtcttccttgtgtattttagtcatcataagcaagccaaaggcaaccatcacaagatgaatcgtgttcacctctaggttcatttgcctaaagccaaacttccctactccatatctgtgtgtatttggaggcaaggcctttaaaatagttggatcacacggttagacacaatctaacttttctccatctaagtggaaatttaggcatcaaagcaagcactgtgaattcaggatcacagaagaaacaaacatgtcagagcacagagcatgaaaccagcaagccaagcagagaagcatcacaaggaaccatacctgtcaatatctcaaagcctgatctcatgcaaactatattcctatagtttaaaccacccagcattcagtgtagtgttacataggcccaaagcatctaaaataaaaccaactctatttgagaagtataattacaagtacaacagaacccctaatggcatttgagagacaaaggtgactaagcagcgtctaatgaagggcatgagcatcacttacatgtgtgcagcagaggacgtgcaatgcaggagggacccttctgggaaataactagccatctcctctcaggaagattaggttcattaaaatgctgtacctaattatcacttttgctttctgggagtatcataaacaaatgctttcccaaggagaaggaaaaatttatggtacacttgaacccaaaggttgcaatgggagaatatgggtcatttaaaaaaacccaacagatttaaatctatgtaaggttttccaagaaggtacttttttggtggcatttcctttaaaaggtgtcttgtatatctagtgtaaaataaatgatagtaatagcacaaatgaatcaccggccgtgttgctaagaaagttcaacttggatagagaatgcagtcttttcaagaaagagttctggactaagtagatgcttacaagtcaaagcaaggagcatgagccataagccgaattgcatacaagaaactgactcaaatgaaccagagacataaacaaaagagccagctacaaaaacatactgcaaacaaaacagaatcaatgtccagttttgcatagagttaggcctatatggtactaaagaaggacaggtgatattaaaaaaaaacaacaacaaaaaacagaaacaaacaaacaaacagaaagtccgtagatactgcattaaagctagaggcctgttatcatgggagtaccagaggagctgaacaagagttttttttattgctcataggagaaaacttgaaaccaggatctattgtaagttgaaatccacatctcttagaaaattctagggtctgatctgagaacaaggagaaaacaggtagttgtgaagtctaaaatgattcttatttacgttatactcccttataatgtggattctgagtaaacaaagcagtaatttcaagctgagctctggttttccaatagcacactcatttacttgcaaaacatgacttgattgaacaccactggccagctgttgtgtgccaactgcaggggcagataagctccggtctacatgtttcttcttgtatgtatagtctgtatcattctcaccaataacctcacccagaatctttcatcaaattgtgcatatgtgtgtgcacctgtgttgggtgcatgagtgtgtgtgtgtgcatgtgtgtgtgtgtgtatgtgcatgtggtatgcatgagtctgtatgtgtgtgcatgtgtgcacctgtgtgagtgcacaagtatgtgcacatgtatgggtatgtctgtatgtgcatgtgtatgtgtgtgcatgtgtgtgtgtgtgtgtgtgtgtgagtgtgtgtgtatatgtgtgtgtgcgttgtaacatttttctagccaacatcactgcattctaggaatgacagcatttttcctcagagacttaacaagttgttaaaaaaaaaaaagctccttgtaaatatgaacagattacttttctaaacctagaaacttgccaatataaaatacaaggcttaaatttattcaaccaatttccctcatgctttttaatagaaaccactttaagagtctgagtccagccaccaggaacccacagatgtggggatgggggtgtctgttagtcccagctctttcttacctctgcatagacccacccatacagagggtccttttctcacatcacctcaggtcccaggtcccaggacctctgtgcggtttctgttcccagtttttcaatcattgttcctttcttatacgcaagggtctccatccctctactcatttagatgtctcaactacaaggtcacatttctacctcctttttctcttcaagcccctctctcctatcatctctttatgcggtgttctttttctttaagggcctttgatagtcctttgtgcatttttttctaactttattactagactgaaggcaacatatgggcatgaatttccttgtaatttccatctttcaacaccttcggacaccaactagagggctttgtaaaaaaaaaaatttaacttggatgtcactttttgacatcttggcatgaaaggatagagaggagttatgctggcaagggctgatttccttttcggagtcagggctaaccagtggttctaccaccacacagacatgagtgttctagaatacagaagctatggcaaggctgcctgagttcaagtttgtgctctgccacttatctgtgtaacatttggcaaggcaatctagtctcatagccttcatttcttcccttgtcaaattatcaatattacatagttcttacattcctgaagtactgcttagcaaagtaagtactacctctctataataagttgacctctaggtacgtagataaaagagaagagttacaagcacaagtggagccactttgtagatcatctggatttttcagacacgtgtgcaccaagagtaagtctctttctacagcctaccctaagccagagaaacacaaacggagctgtaaattccgcttaattgacatttcagaatttcaaagggaagtaattgcgtccctgagcttctctgcactgatccagagtgggacacatctcagcccatggattgctgtggttctctttctttccctgcactctttctccccctcccactcttccaagtcagatcaggccttcttgctgaaggggaatggaaaggagtacctggcggatttcatcttcttcacctaacctggagggagaggacaacttggatagaacttggcatgcctggttttactgccgtggcccccgaggactacccagatctccgctgtccacagagaatggaaattaaattcaggctaactttcatcatcaggaacactcagataatgtgttctgatcatcatgtgcctgtgtgtgtgtcaattttgagcaactctccacgagagaaggcttctcagtggaatggagtcctgagtttctggtccttgggttgtgtccttctgtctgtccacttgctcctgatctttttggatgggaaggcagattgtttgctcttctccccagtgccttcttggatactgtataattaattaggcctccaatcatgccttcccagcctccacggatggagaaaccctctccgccatgccttaaagaggaattgctgtaataaatgagtctcctgatagcaaatttctcagcaagggggaatcgcgtaaatggagacatagtattgacagcaaagtccaatgtgttatttttaccagaacgaactctccggttcaagcctttgaaagagacatttgaaaaccaaaaacaaacaatgtaatggagcgaggaaaaaagccacagaagtgagtggcagggagtttaaaagagcagatgccactgccaggtctatgggacataaccagccacttgtgctgggtcttggcagtttataatgctacctcatcttctccgcgaaattgttttcccgtaaatctctgtggccatccattcctgtctacacattatgttcctaaaatagacaccatctaaaaatcacttcaaggagctttgtggaggaaggcctaaattgcaacactcctccagcgaagatagatgcagtgtttgatggcattaccagtcggtagccaggaaggggagtttgtgaggagtttttccaccacagttaatctgtttctggaaggaaagggaagtgtcagacttcccgaggaggcaaacgtgtgtggaagctctcatttgcatcacccccggcctgtcaggtattgcagcaaaagggagaggtgagctaccctggctctccttgggcaggagggacagaatcaggaagcatcaacctcagcatggaattttcctattcctgtttggcatcctcctcttgggatgatttacagcgcgggttggagaaacacgctctgccactccactagcgcaccagatagacagtgcagacctgcagatccatacccgaggagaagccacatttcctacgtgtgatagcaacagcgtttggcaatttgcgactttgctactgcagcttagaaaatatttagtcacatgcacatctgaacagaaagacacccaggcttgactcagtcatttccgtcagacacacgaaagaaaaagcgtctctgctcacaagcttatttggactgctttgttgaaaggaggggcggcagacactttgtagatgtggcaagagggctttatatccagacctcaaacaggtaggagagaaggaagccaggagaggtaaggaaggggcgtggaaaagcctcacagccacctcgaagaaaacagtttttttgccctgttcagaaagcaagaggttccacagtggttttgtgtcaatggagcacatctgcagtatcattgccgttggtgacctctgtctaattaaaagtaagtcagtccttcccacccggcattgtctgaaacccgggactctttatcactttgctaaagttcatttgcaagtgtagttaaggaagagtcaggggggaaacagcatctgtcccttctggtcctggggaggaggcactcctttccaagagtcaagcctctgcccaaagaagctgcctcccctgcaatgctaggatccaggagcagccccgctgccttcttgcttcctctgtgaggtctaatttttgcatcatctttaggagcgatatgacctctattcacagccatcgaatccagttccaaagcaccaatgacagagggggcttcaagacaagaccttgcctaggaggatgcaggcaagcaaaggcaagagctggcccgatgccaagttattttaggccaaagaatctcatccttctatcaaaatgctgaactgcaaaacgaacctgatttcagttcatggaaggttgagaggaggaggagggggaggggaggaggaggaagagaggaggaggggaggaggagggaggaggaggaggggaggaggagggggacagttggtccgaattcacatgcaaaaatagacttcctgttctgccccaactcttatttccgtgggctcttctccccaaggatttaccaggtaagaattcaccaccaaagaagatcacaatgagataatcagatggcttacctgataaaaaggaaaattatccatctgcagtgaggagcaacatctccccacgacgagtccgcaccttccgttgcaacgattcagattccttcttgcaaaaggtgaccaagtgcttcacaagggctgcagcctcataggggcagaacacacgtacacaaacacacgcacacacacacacacatgcaccagagacctctgcagtatcctctcggcttcatcctcgcctcactctatggtacctaatacaaatcagcaaatagcttgttttaaaaaaaaaagaaagaaaaaaaagcggagacagcacctaacgttacagtgccatctagtggctacatcgtaaataggttctcacagcctggatttctgtgttctttctcaaccgcttccttctggttcctttttcttttttcctctttattttggttttattacttcctcagatgcctttttttcattcccctttgctctgcctatcatggaactattgacttaaagattaaaacaatcagaactggagagcgttgcttttaagttaaaaaaaaaaaggtgctaattttgtttgtaaatgttactttattttctctattaaaaaaaaaaactcattgttacttttacagattacggaacccatgaatgaaatttgcttatttctactgtctggagaaaagtgagtagtcttttactacgtagtcgtgactttacatgaggaattttgtggattctttcttctctaacaccgtgttcacggtgcttttcatactatagtgagtggctctgaaggaggcagatgcgagtttaattttaaactcagtatcgatgagtgtgttttgaagattatatccccctatctttagtattgatgttaaataggattatttttatacccatttccatggtttcaccatcttttattgtaatatatctatttgtctcccagatatgactagccattgaattgtcacactatgttttagagaacaaacgtaagtattaaatattattggtgtccactaggtcttcccaaaacaatgaggagcccatactgaagtctggggagctacaggaactgaactttctaagccatatattataatttaaagcatcattagtctttcacatttggtcatacataaacttatttaccctgggtgtgtttctcttgtcacttagcacacttaatgctgatgaaagtcaccatacatgctttgctattaaaaaaaaaaaaaaaaccaatatcccttagactttaatttgtctattccatactacaggacagggaggcatatactgttaatattcctctagcaattctcattgtatgttgagaataatgagacattctgaaccttattgagacttttctagaccacatagtttgtgaagcaaaacaaaccaaccaaccaacaaataaataataagaataaggataaggcccaccctttcagaattcattattttttggaaaatagtaaatattttacctctttccattctagaatcctggagatgtaattttcattgtttctttataaagaaattttacaagtccttgtttatgggttcatgggtccatctcctgggcccctttcttagtttctgaaaggaagcaattgaccaaaattgagctggaagtatatagctcatttggtagaacacttagtagacatgcaccaaaaaaccaaaacaaaacaaaacaaaaaacaaaaaaacccaaaaccaaaaacaaacaaacacacacacacacacacacacacacacagattttcagccttgtagactgcttgtacaataaaaacttcagaacttggaatgctgaggtagactgatcacaaatatgagttcaaagttattatggggttagaaattccatgccaacctcagcctcagacatagtcacaggctcagcctcagcaactaccacagccatggtcacagtcagagccacagccacaaacacaaccacagtcacaggcacagcttcagacacagacacagagagagccacagtcagggcctcagccacagcattagccacaacctcagccacagccacagctacaggtagagcctcaggcacagacagacacaaacacacaaagacgcagccatagctgtcaaagtcacaatcacagtctcagcctcagacacagactcagccacagcttcagacacagacatagtcataaacacagagaaagtcacagtcatggacacagctacaaccacatcctcagcttcagccacagccatagctatagctacagcctcagacacagacacagacagacacagacagacacatacacagacacagccatagctgtggcctcagaaacagactcagacacagccacaaccactgccacagccattgtcacagccactgccacagccactgccacagccactgccacaaacactgctatagccacagccactgcaataggcactgccacagccactgctatagccacagccactgcaataggcactgccacagccatagccactgctacagccacagccactgctacagccacagccactgctacagccacagccactgctacagccactgccacagccactgctacagccactgccacagccactgccacaaccactgctatagccacagccactgcaataggcactgccacagccacagccactgctacagccacagccactaccacagccactgccatagctgcagccactgctatagccactgccacaaccactgccacagccactgctacagccactgccacagccacagccacagccactgccacagccactgctacagccacagccactgctacagccactgccatagccacagccactgctataggcactgccacagccacagccactgctacaggcactgccacagccacttccactgccacagccacagtcaaagtcacaaacacagacatggccacagtctgagcttcagtccgcactacataatgagaagctgtcttcttaaaaaattaagttaacttcctgttccatctccaaaatgcacaataatttgtagctcttcactgtctgaaaaaagtgttgctccttctctggttcaggctgagtaacactggaagaagctggagtgaccaacacttggtaactagttactagaaagtttgaaatgaaaaggcagaagggaacatttgaactaagaagtagttttatatttatattatgattctaagaccatatactccatatgaacagtacttaggatttaaatatatgcacataaaaataagaacatccaaaagacatactttactacttactaatagcatattccagaagtcaatgttgtgcattttttcttaataataatatcaacatctctccttccttattgccagagtgcacttggtcccttgtctatagaggaccaggagggcgtgggtggtgtgttcccagctgaaccagtctaaagaactatgacatgactgccatctatggaactaaccttctcttttctctcaccatagcattagaagcaggtagggcaggcaggatgcctacaggaaatgtcacagctaatgaagaatgagggaaccatccaaagccagtgcactccctgggttcctaatgatatcacaggtacaaggcagaatctcagaagatctggaacgtccctgatttgagtatacaagacagcccctaaaaagtctctggaccaatctcttttgatatccccgtgtactcaaaaccagttgatttatggagagaggagtttaagccctgaagatatcaaatattggttatatcatgggtgtccaactctgaatttactcacttcaaaagtacctgctaataaaggcattttcccaggcttaattaacaccattaagccaagcaaatgaactcttactttgagaagtttccatctcacaatgagagtcagtgagaaagggagagtattttcaatgcatgcacccctcttccttcggtttgcctgtttctttcatgacttctgcatcttaacaaacatccagccatctgcacaaggcaaagtggaccagtgtctaggtcaaacatctttttctctaatgctttccctgtgttttcagtgaataggctccttttgttaattgtaaaataaatttatgttttcttttatggaatatggtcacggattatattgaaaatgttaatcgtgagagaataaatgtttctttgcagactgtttctgaagaaggttaacattccattcactgtacaagagtgctttttaatgaataaaaaatattcattaaatatagcttgtcatttagtagcagacacgtgattcatcagagtggtaacaacaccaactgctttaatttttcttcatctaagacctgccatgaaggaaaagacaagatttttaaaaattagacccttaaaactatgtatttaaattttaaatgttcactttttaaacataaaaatgtaaactaaaaagaaccgtaaaactttatgctgctctcacccttgtgtttgctggcctctctggacttttgctaaaggtctcccatttctatctgtctaccttctaataatgaactgcagttgggctggcatattatatcccatataccttttgtggtatcttagttaatgaagaaaagtttttatttttcacttttccctggcttatttccatcaacaaagactgaaggggccatttccttatttctgggagaccccatgtgatctcatctcagaaaagagaagaatgttatttcttggctgtctctacttccctagatggtgggtgcaggaacttgacaggtaagctgtgggctgtgcctcttctgtaagcggttccaacaagagaagaaaatgagaacacaaaatgtcttgtcattgcttttgccactctgtctctgtcaggaggacacagccatctctttgccattactctgtggggcatgggctctgcacagacaggatggtctccagttgagctgaggtctgaaccccgtttgtgataattcacctaaatggcacggtaggcgttccctcatgctcctggaactctggctcctgcctaagttactgccccccacaacccccacaagagaagcatggtcagtagtcacgtaggcaatggcccaagcttctgaccttcaagctaaactcctcccctgttacctagcaatagtgaggaccataaaaagggctgtttagcccctgcttgctctcttacctcttacttctcactctcttacccctcactctcaccccctctctcctctctctttgtcttctcttctctttcctttctctttgccttctcctctcctctcctctcctctcctctcctctcctctcctctcctctcctctcctctcctctcctctcctctctccctcttactctctttctctctagccttctctctctctcccttctctctttctccctgcctttctataataaagctttaaaaccatagagagtctctgctcatcaagatccgcttcatgcactctcacaggtgttgggaacctcttccctcgtcccgctcttctataaccctggtggctttagcaaggtagctcctggatccccaggtagggctgccccttggccacccgctgaagagtgggtcagaggcttgaatgcccacccagggatgagtggaaagtgtatggcagctctcccatgcctgacagaccagagaataggtaaaactctggcggggtgtgagtcccccccttccctagggaccccctttttagttcccaacattactccatcacttgctggaaagcattagctgcttagtggccaaagaagggagattacaagagatgttacctctgttggtagaatgtgggtattaaagaataaatgtgggattcaagtggaaaagatagcctaggttctttctacctatcagttttaagataagcaagaggatctcttgtgattagcatcttgaatgattcaaatgttctcaagaccagaaggcattaaaattccacagtgaaattcgtaaaatctcctaacatggaaaaaatatcctttgttaatttcaattttagaatgttaattgtcatgcattgtgacaaccactgcttgaatatattttttgataatcattaaggaattgtggaactggaaagttttctcagaccatccagaagacgattattattttggataacagaaatgtgacatccagagagatagtatgtcttgttcaaggctatacagacagtttggaattgtaaaagttcattcaaactttcttccccgtttaactatgaagaaaatgaatattgagcaatgacatcggcacacaagaagtgaaatggaagtgaggggagggtttctggatataccacgattgattttccctaatgatttgactaatatgaatgaaataggaggatataatagaagctgtctgtttaaaaaggtgatggaccaggagggacttccagtggagggaggggaacaccaacctattcacaaaacctttggccccaaatttgtcctacctataatatgtgcagggataatatatggggcagagattcaggtacaagttaaccaatgacttccccaactttagaagacccccgcccccatgggagatctaaatcctgacactcttagtgatattctgctatgcttgcaaacaagacactagcataactgtccagcagccagtggaaacagatacagagtcccacagccaaacattaggcagaactctgggagacttggggaaggatcgaaagagtcagaggggtcaagaacaccacaagaagctctacagaggcaactaacttgagcccatggggctcacagagactaaaccaccaaccaaagagcatgcagaggctggatatggaccccttagacatttgtagcagatgtacagcttggtcttcatgtgggcctcttaaaaatttgactgggggttgtctctgcctctgttacctgcttttgatgccattcccctagctgggctgccttgtctggcctcaatgggagagaatacatttcgacctgctatgatttgatatgccaggtagattggtacccatgggggttctctgaggagaaggtgaggtggcactgagggagcagtatgtgagggcaggcctagcagtatgtgagggcaggcctagggagagaggaggtagaagggttacatcaggatgtaaagtaaattaaaagaaaaggtgaaaggctaaaccaatattgggttaagcactgatcaccctcatgtatagctttgcagacagttcttaaaaattgaccacaaacttctcaaactcaaggacatgagagtacaacactcatgactttcattcatgtccaaggagagacctggaagaaaattgtcccaaggttctaaaatttcattacaatctgaagtaaaatctgaaaacacattttatgtttccttagttaataaatcatagcctcgaaggaaaacaaagaaaccttttctttctttctttctttctttctttctttctttctttctttctttctttctttctttctttctagataaagtcatgatcttgtcttgtgtaccttcaaagacccagacctaaatggtccttctgtcttgcctttcaaatagtcaggactgatggcatgtaataagtaataagggctggaaagtaaagtagtatgctgctcatgcctacattgtatacctcactggcaaacagatcaaggactaggccttagccttggaggcaagatctaggcatattacagtatttcaattaatttgtctggatctactcttacagggggatgaagagagaatgaaactataacaagaaacaaagaaggtacatggaaagtcataaaggatttggtaactatgctggattctcttctgtgctcatacatactggcttttatgtcaggaagtcattgaaatatattgcctgggttcctccctcatccctttcactcaacaatcctcctcctttgcagaggtaagccaactaaaactgtgacaaaaatatcatcaattacttattggatttcaaagagcaattttccatttgactatattttgaagtcaatcacagcacttgcctatatatgcaagagatctagcacactttaagtttacagattatttttgatattaaaggaaattgctgatatttatgaagacaactcacttttataaaataaaactgaactttgccatgacttaggataagccaataatgtgtaggcaaatatgtaattcctattcccctgaaggcttattggtgacatctttttcttttcctgtttaaaaggaaaaaaatctactgaccttcctaggaacctctcacagtcctcacactgtgtgtgggtgtcattacagccaagtgccatcttatttcacatggcttagtgatcattgctgaagaagtggaggaaagagtgtgagagacagaggaacagcaagctttctgtgagactgggtctcctagaaatgccagagagattacacccatagagtctcatcaacatggctgcctaaataagacctgaacaatgacaacaccaatggccatactaacatgcaactggggaagataaggaggttcacactagaggaagaactatggacaatagggaaatgataagaactggagaaatggttttccctgaggaagaactccccaattgttatctgctataaagtggtcagccctggcataagatgcatacaggtaacactatatggactgaccaggtttacaatatcacagtgaatgctatgtgtttcatatatacaagctatctatctatctatctatctatctatctatctatctatctatctatctacaattaaataacaaagatgccatgaatttggatgaaagcaaagagggttacatgggaagagttggggagagagaaagggggtcatgttctaattgtaacttagaaaacaattttaattactataaaaagcattcataggtttagcataattcatagaaacaagctctctatgataaatgattctacttaacaccttgatacttggtaccatcctgtggtaagataggttctcagaaaaaaatgtattgatacttaaatatttatttctctttccaggtcaaaatttgatagtgatttcaaatatatggaaattattgctaaaacttagtataggctgagtatttgaacactcacaggaaattcatgacattgatatttttgccatcattttataggttagaataccaaaaaccaaaactatttatcatttttgccaaggagataaaatgtagcttggaaaatagcagcctatcttcaaagtcgggtccttgttttatagaaatctctttctagcaccacattattattatgctattgtcaagtctctgggatccaaggggaaaataggagatggtgcagctcttcttcactggtctgggaaagatcacaatgtgcttacatagacaccatggatgaaacatatttctaaatgtacccaaggaaagggggttttgaggtacaaggcaggctggcagccacagttccaacaaatgtggtattgggtatgtggccaagaaggaaagtagcaaatgacacctctttttacttgaccctaagtctcagatctcctactgcagggtggtggactgtaaggtatggttgagccaaaggcttgatgccctggagaccctgaagatttagtaggagcttcgcctgctctcagcaccaatcccctgtcatatagccatagccccctatagatttgtggttatcagtagctgaagggcaatgcccaagcccttccacatatagatgaagcatctctaacatctcggaccaagaggcatgactacagtcatgtaagctcaaaacagagttctctatgccaatgaggtacctagaggtcgagagggcattccaataagcttcctttcccatacatttctccctgcaaaaggtatatcatctcatgccaaccctgagaagtggggtatggttctacagatccattttccaccatgacaataataaactgtttgggaccatggaatgcctctttttttattgtgatcaacagtgggaagacatggagaaggccttcgcctacagagtcacagtctagtctctgaaagaaggcatctttgcattctcagccacgatcaccaccaagcctgccactatcaagccaaagacaatttctgcagggactagctggagctcctcccccatgtccaagatcctgagaacccacagttctggggagcaccgaaccagtacggagtcaaactcccccatccagtctccacaagtggccgtgctcagtggtgggacagacttgtgatgacacaaccctacatcctacaacatgtgaaaggatatgactgtttggaaattctcttgccaaatgaacacatcaactaaatttcagaggagcattcaggggagaagaatctctcagtctgtcagtaccttagtatccacaagtcgacatttgttgaacataaaaaaatgaaaagagcagaatttctgagtgtgagaggttgacaatgaggcttctgacaaagcttcatgtttcaaatataatattcaatgtcatgtttttctttttctcagcacattttttgaaaaggcaagtgctttctggctctgctggatatttgtgaagacacggatcacatgagaacataaaactttgtaagctttaaagccttgcttctcgtccgagtgtggcagtggaacaacagcatctccatctttgaggggcttgttaaaattttggaccatttcctttgtcccacaacctgccagatcagaaaggacgttttgacgagctgcccatgtgattccagtagacactgtttaaaagtgttgctgtagagtgccgctataacaggaacttgagaacttaacataactgatgttatgacgcaagtaccattccctaatgctcctgcaatcttttcatatcacctcaagttgtagggacagccaaccataaaattatttctgtttctacatcataactgtaatttttctaccgttatggattgtactataaatatctaatatgcaggatagtcttaggcaatcgctgtgcaagggtcatttgtccccaccaagggttcatgacccacagattgtgaactacccatttagaccctaaaagctcagcacatagacagtacacaacaaagacaaagatctgatccatcaaagttcatagttctagaaccatctctaaatgcaccacctttggatttttggcttctgtagttctgctttggctaactgttcttactaacacaattccggaggtggtttcactctgagaaaggttcaggattatacaggatcatgaatacccagtgttgtctctacccagctgataaagactttctattgtcttaaacccatgtccatgcactcttctctggtggacaacccacaacattagctaatactttcacacctctcataagagcttttatttttaattaaattttaattttgcatgcaaaataatgtttttattatgacattatatatatttatccatatatgcataaatatatacatatatgtcattacatatacatatatataatgtctatatatgtatataacaaatcattgttcttatttgtttaccccttactcctctacccttctccaacctcttctttttggtctcctttctcctcctaaataaacctcccttctgatttcatgacccatgtgacctaacgtttataaggctacctatttttctgtacccagagcatgtgactaaacaatttgtcccttctcatcattttctgggcactccacactccaatccagagaagctatctcctaatctactcttgaagtaacagtttgaaaattagatcaccatgctggctctttaagtaaaacctagccttcctatttactgcacaggtgcaggccataccagtcagaaaagggaagagccccaccagataactgaaccctcctgataactaggtttggagcccaaacacccaagccactgacaccaccaccctactgcctgctcccacttcttgcacttgcctctacgcaggtgactctccagagcacaggtgcaggccaggctaatgagaatgagtaagaggcccatctgcactcagaaacctcctatgcccttggtttggatccccaaggcacactctgtagacatcctttctgtgttttatcacccacagagctcagttaatatttttaacaaaaccatagaggaaaaatttcctaaccttaagaaggacatgtttctaaaggcagaaaaatctcttaagacacaaatggattgaattggaaaagaaagtccctggtcaactaataatcaaaacactgaacatgcagaacaaagaaaaatattaaaagctgcaagagaaaaaaggccaaataacatgaaaaggtagaattattagaattatatttaatttcttaacagagaccctaaaagccagaatagcctggacatatgtcttacaggctctgagagaccatagataccatcctagactcgtctaacaagcaaaacttaaaataaaaagatttatttttatatgagtataccactggtctcttcagattcaccagaagaaggcatcagatcacattacagatgtttgtgaggcaccatatggttgctgggaattgaacttaggatctcggtgctcttaatcactgagccatctctccagcccgccagcaaaactgttcatcctcatagatgggtaagacaagatactgcatgacaaagtcaaatttaaacaaaatctactcataaatccaggcatatcgaggtacaaatggaaatcaacaaccctaggaggttaactacacccatgaagaaataaataagctcatacaaaaattagagggaaacacacacacacacacacacacacacacacacactagcactaccataaacaacaacaaaataataagaattaacacttattaatcattagtatctctcaatatcagtggactcaattcctcaaaaggcacaggctaacagaatgaataccaaagcaggatttatccgtttgttacatataagaagcacacctcatcatcaaagctagatattacctaagagttgagggtttggaaaaagattttccaagcaaatgtacccaagaaacaagctgttgtatctgttgtaatataagacaaatcgacttcaaaacaaaaattaatcaagtagacagaggacacttcatatttaccacaggaaaaccccaccaagatgatgtctcaattctaaacatctatgcccctcaaagcaaggacacccacatttgtaaaaccacacatcaaaacacatgtattaagtcgggcgtggtggcgcacgcctttaatcccagcacttgggaggcagaggcaggcagatttctgagttcgaggccagcctggtctacaaagtgagttccaggacagccagggctatacaaagaaaccctgtgttgaagcccccccccaaatatgtatttacagtgggagacatcaggtcattcagacaaaaacttaacagagaaataatggagttaacagactaacagacttaacgtggacttaacagttatctacagaacatttcacccaaataaaaacaatatacattcttctcagaaccccatgaaacttctttttcaaaattgaccacagactctgttacaaagcaagtctctacagatccaagaaaactggaacaactcccccatctcatcagaccatcatagattaaagatgaattttatcaacaacagaaagaacaaaaagcttaaaaacttatgtaaactgaacaactctctactgaatgacccctgggtcaaacagaaataaaggaagatattaaagactttctagaactcaatgaaaatgaatgcacaacatacacaaacctatggcacacaatgaaagcagtgctaagcggaaagttcataacactaagaaccttcatatagaaattagagagatttaatactagcaacttaacagcacccctaaaagctctagaataaaataagcaaatacacccaagaggagtagatggcacgaaataaactcggggatgaaatcagtaaaatagacacaaagagagcaatacaaagaattaatgaaacaaagggttagttctttgagaaaatcaacaagacaaaatcaacaagacagacaagccattatccaaaccaactaaaaggcagagagagagagagagagagagagagagagagagagagagagagagaatatcttaacaaaatcagaaaagaaaaggggggcatgataacagatactgaggaaatacaaagaatcattaggtcgcacttcaaaaacttactccacaaaattagaaaacctaaaagaaatggacaactttctcaatagataccacttatcaagatcagataaacaattaaaatagacctatgacctataaggaaggaatcacaggaagcagtcatttgaaaaggctcccaactcccctacctcacaaaaaggaaaccctcaaacaagagctaatatcaataatccttaaattattccacaaaatagaaatagaaggaacatcaccaaattcatttcatgaggccacagtcaccatgatacccaatctgcaaaaagactcaacaaggaaagagaattacagaccaatttttgcccatgaacattggtataaaaatactcaagaaaatatctacaaactaaatccaatatacataaaagatgtgttcaacatgaccacataggacacatcacagagattcagggatggctctacatatgaaaatctgtcaatgtaattcaccatacaaacagtgaaaaaatacccgacgtgatcatctcattagatactacaaaagcctttaacaaaacacaacactccttcatgatacaagacttagagagatcaaggatataagggacatacctaaacatagcaaagacaatatacagtaggtggatagccaacatcatgttaagtagagagaaactcaatgcaattttacaaaaatcagggacaagacaagactgtccatagtacttgacattctagctagagtaataagacaaccaaaggagatcaagaggaatacaatttggaaaggactaagtcaatgtattattattttcagatgatatagtagcatatacaagcagcccataaaatttttccaggaaactcatacaggtgataaataccttcagcaaagcagctggatacaagattaactaaaataaataataaataaataaataaataattcagtatccttataaacatcaaatgggttgagaaaaaagaaatcaaggaagcaacacacttcatggtagataaagataatataaaatatattggggcaactgtaactaagaaactgaaaagcttatatgataaaagctttaggtctttgaagaaagaaattgaagatgtcagaagattaaaagttctcttatgctcatggacctgtgagattaacatagtaaaaaaaagcaatctacagactcaatgcaaaccccatcaaaattctaaaaaaatttctttacagacctggaaagaacaattctcaacttcaaatggaaaaccaaaaaaccaaggatagctaaaacaatcctgtacaaaaaaagaacttcctaaaactaccacacccctgattctaagctctttgacagagctatcatcataaaaacacatggtataggcataaatacagacaacttgatcagtgcaatcgaatcaaagacccagatgtaaatccgcacacctgtggacacctgattttttattaaagaagacataattatacaatggagaaataaagcatcatcaacaaatggtgctggtttaactggatgttggcaagtagaagactgcaaatagatccatgtatattaccctgcacaaaactcaaggccacatgaaccagagacaccaacatcaaaacattgcacctgatagaaaagaaaggaatagccttgaatgcattggcacagaagacaacttcctgaagagaacatcaatagtgcaggcattaagatggacatttaataaatgtttcctcatgacactgaaaagcttctgtaaggcaaaggacaccatcaaaaggacaaaatattcaaggtacagaatgggaaaagatatacactaactccacacctgacagacagctaatttctaaaatatgtaaaatcaagcaagcaagcaagcaagcaaacaaacaaacaaaaaaccctcaagaatctagacatcaacaaacaatccaatttaaaaatggggtacagctagttgtggtggtgcacacctttaatcccagcactcagaggcagaggcaggcagatctctgagtgaggccagactggtctatagagatatgtccaggaaagacagagaaactctgtcttaaagctccttaagacccaactataccaatcctgagcatatacccacagaacagtccacaaggacagttgctcaactatgtttataccagctttatcatgaaatttgcaggaaatgaacagatctagaaaaaagtcatccatagtgagacccagagagaaaaacacggtacacattcagttataagagtatattctctgtaaagtaaagaatcagactcagagaggctaagcaacaaggaaggctcagtgtgtggggggcacatgaatttcccttggaagataaagtagaatagatattgtgggtagactaggttgggtagggaggaggacaagaagaatcatgtggggaagggggaggacatggagcaagcgagagagagagggagagagagagagagagagagagagagagagagagagagagagagagagagagagagagagaactggaaagaggagaaggacattttggcagtgatgcagaaacctaacacaatggaagctcccagcaatctacaagggtgacctagctaggatccctagaaagtgaggacacagaaccttaactagccatctcctataactagatatccagtggagggattaggataccaactcaacctcagcacattcaacttataatttttcctgcctacaagatgtactgtggtgatacaaaaattgggggagtggccaaccaatggctggttcagcttgaaacccatagagagagagcccagggctgatactgactggaaggtcaggacccagagagaggctggatatcccagacacctcagatagaaccaaacactattgaaaaaaataagtcaatgaaatgattcctagttaggttctgctgtacttgtagacaggagtctagcaccatcatcatgagagtggtttcatctagtaactgatgcaaacagatgcagagacccacagcctaacattaagtggagctagaggaattcttggaaggagggcggagttgtaggagctagctgggtcaaggatgccacagaaaagcccacagaatcaactaacctggattaataggggctcacagacactgaatcaatagccagtgagcctacatggactgaccgatgccctctgcatatatattatggttttgtagcttagtcttctgtgggacttgtaacagtggaagcaaggggtgtctctgtctcttttggcctgcttttgggaccctcctcttttccactgaggcaccttgtccagccttcatacaagggaaggggcctagctttgttgcaatttgatatgtcatgtttggttgctatccctgtgaagactgcccttttccgatgggaaatggaggaggaatgggtgaactgggaggaggcaaaggggaggttcaggaggagtgaggggagaggagacagggtaagctgtgaactggatataatatatgaggagaaaaaataaattaataaaagagagagcaacagcaatccacgttttctttgcctaagcagattctacacaggtagtagacgtaaacaattccttttctgaaactttatgcatgtgtttaagtacatgaaattcagttttccagcaatgatatcatgcgctatatatagctacataacttgtttggtttaaatgacctcatttacttccttgttattaacctaaaagcacctttccactatacaaaattttctctaaagtacgttttgaggaaacatctgcttttacacaatggcagattccaatcagcttccctgcaaaggtgtggtgctgttgaatactccagcagtagtaaccttgccttcccacagttttgttttctgggagggcacatctaggcaacgccttgattttgcttgtcaatttacctgaggcttttgggagggccaggtgatggttatgtatacacagaaagagggtcagatccaagcacacggctagagcgcggcaggagtggtgaggtccagatcccatgggcctagagcatctgacaaagacagaaaactggagccaggctcacatggaaatcgggaaaaccatgctgagaagacaacagcaaggacttactgcattgttcctttcttttaaaaaaattagatattttctttacttacatttcaaattttatcccctttcttcctttcccctctgaaagctatcctgtctcaccccctcccccctgcttactaacacatccactcctacttccctgtcctggcattcccatacactgggacatcgagtcttcacaaggctaagggcctctcctctcattgatgtcccacaaggccatcctctactacattgagtccctccgtgtgtactctttggttggtggtttagtccctgggagttctgggggtactagttggttcttattgttgttcctcctatggggctgcaaacctagtcagctccttgggtcctttctctagctcctctattggggaccctgtgctcagtccaatgcatggctgtgaacctccacttctgtatttgtcaggcactgggagagcctctcaggagacagctgtatcaggctcctctcagcaagtacttgttggcatccacaatagtgtctgggtttggtaattgtatatagtacggatcctcaggtaggacagacactggaggccatttccttcagtctctgcttcccactttctctctgtatctcttcccatgggtattttgatcccccttctaagaaggatcgaagtatccacaccgtggtcttccttcatcttgagattcatgtgatctgtgaattgtatcttgggtattccgagcttttgggctaatatccacctatgagttcacagcagccttatttataatagccagaagcaggaaataacccagatgtctttcaacatagaaatgtattattcctttcttacagtaagagggagatttctatttccttacagggcagtgacataatagtagcatccttctgattggctaaattgttcttcaatcacagttgagaagttatatctgtgagagagggttgactgctaggagaacaatgattagtaagttggaaggacaaacgaataccttttctgtcctcattgtacggatcaatacaaatctacttctaaagccggacgtggtggcgcacacctttgatcccagcactggggaggcagagggaggcagatttctgagttcgaggccagcctggtatacaaagtgagttccaggacagccagggctacacagagaaaccctgtctcaaaaaacaaaaaacagttccaggactcagcagaacttaggaaattagtctgaacaggtgagagggtgcgccagagaaccggacagcttctgggataggcggaagcacagagccactgaggcagcacccttggcgggctgcagacagccggccaccgtccggaccagaggacaggtgtccgcctggcttgggaggcggcctcagcctcagcagcagcggtcgccatcctggttccaggactccgtggaacttaggaaattagtccgaacaggtgagagggtgcgccagagaaccagacagcttctgggataggcggaagcacagagccgctgaggcagcacccttggcgggccacagacagccggccaccgtccggaccagaggacaggtgtccgcttggcttgggaggcggcctcagcctcaggagcagcggtcgccatcttggttccgggactccctggaacttaggaatttagtctgcacaggtgagagtctgcaccacagaagctgacagcttctgggaactgccaaagcaacacagcttcggagaaaggccctgttttgggccttctttttcggccaggaggaggtccaaaaacaagatatctgcgcaccttccctgtaagagagcttgccagcagagagtgctctgagcactgaaactcagaggagagaatctgtctcccaggtctgctgatagacggtaacagaatcaccagaagaacaatctctaaacagagtcaactctaactactaactccagagattaccagatggcaaaaggtaaacgtaggaatctttctaacaggaaccaagaccactcaccatcatcagaacccagcactcccacttcgtccagtccaggacaccccaacacacccgaaaacctagacctagatttaaaagcatatctcatgatgatggtagaggacatcaagaaggactttaataaatcacttaaagaaatacaggagaacactgctaaaaagttacaagtccttaaagaaaaacaggaaaacacaatcaaacaggtagaagtccttacagaaaaagaggaaaaaacatccaaacaggtgatggaaatgaacaaaaccatactagacctaaaaagggaagtagacacaataaagaaaactcaaagtgaggcaacactggagatagaaaccctaggaaagaaatctggaaccatagatttgagcatcagcaacagaatacaagagatggaagagagaatctcaggtgcagaagattccatagagaacatcggcacaacaatcaaagaaaatggaaaatgcaaaaagatcctaactcaaaatatccaggaaatcgaggacacaatgagaagaccaaacctacggggataataggaatggatgagaatgaagattttcaactcaaaggaccaacaaacatcttcaacaaaattattgaagaaaacttcccaaatctaaagaaagagatgcctatgaacatacaagaagcctacagaactccaaatagactggaccagaaaagaaattcctcccgacacataataatcagaacaacaaatgcactaaataaagatagaatactaaaagcagtaagggaaaaaggtcaagtaacatataaaggcaagcctatcagaattacaccagatttttcaccagagactatgaaagccagaagagcctggacagatgttatacagacactaagagaacacaaattccagcccaggctactatacccagccaaactctcaattaccatagatggagaaactaaagtattccacgacaaaaccaaattcacacattatctctccatgaatccagcccttcaaaggataataacagaaaaaaaccaatacaagaatgggaacaacgccctagaaaaaacaggaaggtaatccctcaacaaacctaaaagaagacagccacaagaacagaatgccaactttaacaacaaaaataacaggaagcaataattacttttccttaatatctcttaacatcaatggtctcaactccctaataaaaagacatagactaacaaactggctacacaaacaagacccaacattttgctgcttacaggaaacacatctcagagaaaaagatagacactacctcagaatgaaaggctggaaaacaattttccaagcaaatggtatgaagaaacaagctggagtagccatcctaatatctgataagattgacttccaacccaaagtcatcaaaaaagacaaggaaaggcacttcgttctcatcaaaggtaaaatcctccaagaggaactctcaatactgaatatctatgctccaaatacaagggcagccacattcattaaagaaactttagtaaagctcaaagcacacattgcacctcacacaataatagtgggagacttcaacacaccactttcaccaatggacagatcatggaaacagaaactaaacagggacacactgaaactaacagaagtgatgaaacaaatggatctgacagatatctacagaacattttatcctaaaacaaaaggatataccttcttctcagcacctcatggtaccttctccaaaattgaccacataataggtcacaaaacaggcctcaacagattcaaaaatattgaaattgtcccatgtatcctatcagatcaccatgcactaaggctgattttcaataacaaaataaataatagaaaaccaacattcacatggaaactgaacaacactcttctcaatgataccttggtcaaggaaggaataaagaaagaaattaaagactttttagagtttaatgaaaatgaagccacaacgtacccaaacctttgggacacaatgaaagcatttctaagagggaaactcatagctctgagtgcctccaagaagaaacgggagagagcacatactatcagcttgacaacacatctaaaagctctagaaaaaaaaggaagcaaattcacccaagaggagtagacggcaggaaataatcaaactcaggggtgaaatcaaccaagtggaaacaagaagaactattcaaagaattaaccaaaggaggagttggttctttgagaaaatcaacaagatagataaacccttagctagactcactagagggcacagggacaaaatcctaattaacaaaatcagaaatgaaaagggagacataacaacagatcatgaagaaatccaaaacaccatcagatccttctacaaaaggctatactcaacaaaactggaaaacctggacgaaatggacaaatttctggacagataccaggtaccaaagttgaatcaggatcaagttgaccttctaaacagtcccatatcccctaaagaaatagaagcagttataaatagtctcccagccaaaaaaagcccaggaccagacgggtttagtgcagagttctatcagaccttcaaagaagatctaattccagttctgcacaaactttttcacaagatagaagtagaatgtactctacccaactcattttatgaagccactattactctgatacctaaaccacagaaagatccaacaaagatagagaacttcagaccaatttctcttatgaatatcgatgcaaaaatcctcaataaaattctcgctaaccgaatccaagaacacattaaagcaatcatccatcctgaccaagtaggttttattccagggatgcagggatggtttaatatacgaaaatctatcaatgtaatccattatataaataaactcaaagacaaaaaccacatgatcatctcgttagatgcagaaaaagcatttgacaagatccaacacccattcatgataaaagttctggaaagatcaggaattcaaggcccatacctaaacatgataaaagcaatctacagcaaaccagtagccaacatcaaagtaaatggagagaagctggaagcaatcccactaaaatcagggactagacaaggctgcccactttctccctaccttttcaacatagtacttgaagtattagccagagcaattcgacaacaaaaggagatcaagggatacaaattagaaaagaggaagtcaaaatatcactttttgcagatgatatgatagtatatataagtgaccccaaaaattccaccagagaactcctaaacctgataaacagcttcggtgaagtagctggatataaaataaactcaaagaagtcaatggcctttctctatacaaaaaataatcaggctgagaaagaaattagggaaacaacacccttctcaatagtcacaaataatataaaatatctcggcgtgactctaactaaggaagtgaaagaactgtatgataaaaacttcaagtctctgaagaaagaaattaaagaagatctcagaagatggaaggatctcacatgttcatggattggcaggatcaacattgtaaaaatggctatcttgccaaaagcaatttacagattcaatgcaatccccatcaaaattccaactcaattcttcaatgaattagaagtagcaatttgcaaattcatctggaataacaaaaaacccaggatagcaaaaactcttctcaaggataaaagaaactctggtggaatcaccatgcctgacctaaagctttactacagagcaattgtgataaaaactgcatggtactggtatagagacagacaagtagaccaatggaatagaattgaagactcagaaatgaacccacacacctatggtcacttgatcttcgacaagggagctaaaaccatccagtggaagaaagacagcatcatcaacaattggtgctggcacaactggttgttatcatgtagaagaatgcgaattgatccatacttatctccctgtactaaggtcaaatctaagtggatcaaggaacttcacttaaaaccagagacactgaaacttatagaggagaaagtggggaaaagccttgaagatatgggcacaggggaaaaattcctgaacagaacagcaatggcttgtgctgtaagatcgagaattgacaaatgggacctaatgaaactccaaagtttctgcaaggcaaaagacaccgtcaataagacaaaaagaccaccaacagattgggaaaggatctttacctatcctaaatcagataggggactaatatccaacatatataaagaactcaagaaggtggacttcagaaaatcaaataaccccattaaaaaatggggctcagaactgaacaaagaattctcacctgaggaataccgaatggcagagaagcacctgaaaaaatgttcaacatccttaatcatcagggaaatgcaaatcaaaacaaccctgagattccacctcacaccagtcagaatggctaagatcaaaaattcaggtgacagcagatgctggcgtggatgtggagaaagaggaacactcctccattgttggtgggattgcaggcttgtacaaccactctggaaatcagtctggcggttcctcagaaaactggacatagtactaccggaggatccagcaatacctctcctgggcatatatccagaagatgccccaactggtaagaaggacacatgctccactatgttcatagcagccctatttataatagccagaagctggaaagaacccagatgcccctcaacagaggaatggatacagaaaatgtggtacatctacacaatggagtgttactcagctattaaaaagaatgaatttatgaaattcctagccaaatggatggacctggagggcatcatcctgagtgaggtaacacattcacaaaggaactcacacaatatgtactcactgataagtggatattagcccaaaacctagtatacccaagatacaagatacaatttcctaaacacatgaaactcaagaagaatgaagactgaagtgtggacactatgcccctccttagaagtgggaacaaaacacccttggaaggagttacaaagacaaagtttggagctgagatgaaaggatggaccatgtagagactgccatatccagggatccaccccataatcagcatccaaacgctgacaccattgcatacactagcaagattttatcgaaaggacccagaggtagctgtctcttgtgagactatgccggggcctagcaaacacataagtggatgctcacagtcagctattggatggatcacagggcccccaatggaggagctggagaaattacccaaggagctaaagggaactgcaaccctataggtggaacaacattatgaactaaccagtaccccggagctcttgactctagctgcatatgtatcaaaagatggcctagataggccatcactggaaagagaggcccattggacacgcaaattttatatgccccagtacaggggaacgccagggccaaaaagggagagtgggtgggtaggggagtgggggtgggtgggtatgggggacttttggtatagcattggaaatgtaaatgagctaaatacctaataaaaaataaaaacaaaaaacaaaaaacaaacaacaacaacaacaaaaaacccaaaacaaacaaatctacttctaacaatctcactagactatgggggctggaaaccagggcccccttcactgttattactactttcttcttttccaacattacaagaccatgatactatttttgggaaatgtcatatggaaaattgacacctgttctgctcatatgttcccacacaggacagtttcaacagaatttgcatggcttttcccatgtcttatttcttttgttcctacttgttgatataaaagcaaagcaaagcaaagcaaagcaaagcaaagcaaagcaaagcaaagcaaagcaaagcaaagcaaagcaaagcaaaacaaaacaaaacaaaacaagcctcacgaaacagtatagtgtcactgtattagagaagatcagaatcccagccccagccacacagaagcaatgtgagtgagcctcaggcccttgctcctgctaagttcccattggtgaattcctaagtggaaccatactgtggctactgtgaaaaacacggaagcggccacacaaaaaccaccctgaagtatcaaattctgtttctttagctgtattcctaggattactggatcatgtggggattttactttaagtcagagtgtacatactgctgtgttctgctctgtaggagagaagagaagagagagagagacatagatttggtaccttgtgatctcaactttattatttttttcttaaaagtgatagcatcaaaagaacctatctttttaaacttctgtgggtctcagaacatataatgtgtgaatttacttagaaatgtggataaactattgcaattatcaggtaataattttgcctaatagaaatagagttacatacatcttagaccagatttctgagttcactcagatctcagcttgtacttgtagaacaggatatcaaaaaagctcttagaagtagaaaaagtgtgtgtgtgtgtgtttatgtatgtatgtatttgtgtgtgtgcttgtctgtgtgtttgtgtgcttgtgtatatgtgcatgtatgtgtttatgagtaggtgtgcttatgtatatgtatgcatgcatgtatacatttgtgtttttgtaaagtttgtatatttctaccatacatatacacgctagaaaatatctggactgtgttgctaagttttttgaggtaataattcctgggaagagattacttgactttctgaagctctaacatagactacgtataatttgaaaggccatgagagttagtataacttggatgcaaagacgactgtgaatataacactctttccagctctatgacataatatattccatctatttccttctgggtgcatagtcctacactggggtccttgattgcctgtgttcattaatgagtttgtgtgtctacatctggataaaaagctacggaaagacagactattgtacatgtcacacgaggaaactggggcactcctggatgttgcagggatggcaaagaggggagggataagaggtgcagaaaaaaaaaatgagaatataaatccctatcttcagttaagtggattcaatctaatctaaaagtctttcactttgctaaatatttggtataggctagtagtggagggtgtctgggccatctggagacttcaggacaaacaggatggtgaagagctaggtccctgggaagctgcagaaagagttcggctttccacagtctgtgggtacttaactgaattacacatgcactttcatgaatatgatggggtctaaatttactatattacatacgtggccatatatttatttctattgtaatttaacttaccagtaggagaagcaacacatttgttgtcttgtttactataatgtaattgttcataagaaagataatctaaattggatgtacttaaattgctgtgtgggaacagttctgccttggggggacatttgttagtctctaccagcacatcagttcaacaggttagtgatagtggtcagaattctgctatgcacaagagagacccctaagaattcctgaccccaaaccccaaaaatactagctggttttgtatgtcaacttgacacagctggagttatcacagagaaagaagcgtcccttgaggaaatgcctccatgagatctagccgtaaggcatttctcaatgtgggtggtgccatgcctggactggtagtcctgggttctataagaaagcaagctgagcaagccacacaaagcaatccagtaaggagcactcctccatggcctctgcatcagctcctgcctctaagttcctgtcctgtgtgagttcctgttccagcttcctttggtgatgaacagcaatgtggacgtgttagctcaataaaccctttcctccctaacttgcttcttgatcatgttttgtgcaggaacacaaagcctgactaagacacccaattaggcccagccgcaatcttgtgttagaacaatcacttactttacagagagaaactgagcaccaaaggggccagtgatatgtgcaaagtcgctctgagcatataagagaggtaggtcctctagtgtatttacatcgtgccatttagcttcaaagagctagtattccacatggaactgctgaaaaaccaatattgctgggaaccccttgcacttcagatatggtacataactgcacagtaaacatcagtccacagctagccatagttaggccaggcaagaagaaacagagaatttaattatgtaacacctattcagatattgtatgaaaaccattttcatatctgaccaagttactgtcccatgtactggatcttcacacacctcactactgcctggaggttgtaagaacttgcatttctagaacctacaaagggaagttctaagtgtgtctgccctgaggcccaaagacgggcatttccaaatgttccattcagatgctgacatagctagtagctagctttctcagaccactgagaaacactgcctaacatttgatggggaaatggcaaatgctggtctaagagtaaacttgaatctcacccttcatgtaatctcactttaagagtgattaatgttaattcacacaaaggactataatcatataagtggtaatttagacataattcaaatttcaaaaagtctaaaaaggaagaaatctgtaggtttttgatagcctatagagacaacattaaggaataatcatatgttatttgaggagaagagtgataccctaaatataataagtattatataaaaatattatatataaaataccctaaattggaagacatccaaacaaataatataaatattattctgtatgcattctttatttttaacattttatttctgctagactgagtgaccttgatctattgggcctgccgagctgtatctacggggatcgttgctattgacatcagtaatataaaatcaggcctttagggagccgtaactgtctcttcaaatgatttgggaaaatgtgtacatcttcaatcaattaaatacaggacaaatttagtcaatcacaaatgatcaacacgcccctgttcattgtgcttagcagtatgaaaatggcacccaggcaaattgatttcggtaacactccttttcattcttttaattcaatagtgagaagaatataaggcagttttcaatgttctatccacagtaatcctgtagttagtctgccttactgcttacaccagagctcatttgaagacacccaagcaaatgacaggaaacttttaactctggtcaagtcccaatcacagacccttgcttgccaaggacacaaaggaagccaaactttcaaacatgctgcattgatctccaactttttaaatccctctgtcattttaaatgaggtgcactcggttgtgtcatcatctcggttttaattgtgtgaaaatttcctgccaatctcacaccgctgcggcaacctcaccttgctacttgccctgcaagttctgcagtgtgccgttctgagtatgccgttttaactagttcttgcagcaggacacaaagcgagatagtctgatagaaccagttctcctctggttttacctttactcttagatgagttaagggtcacatcaaaccagggctcagcccgccagatctcctaagcacagcccctcctgacccaatgcagttaacccaacctcattcagcgctagtatcaaatgacactggagctgctgcagtatgcatcccgagactaagtaggcaggatttattatcagcagaagtcccctaactaccaggttattcaagctccgttcttgtcacaaacaggcgcggcggaagacacagtgcagcagactcagagctcatttacaagacaagcgaattctcagttagagacaagggcagcgcggcagcgaactgcagtaaatcttttcacgctcacagcaacatctaacaatgctctcctgcaacgcctcagatcaaacgaatcctacttggtttaaacatcaaatcaacaccataaaaaaggcttcattagcaaagttcaatttaggatgtttttaatcgtgtcttaattctagaaccagtgcgagactttccatgcttattcaagcatgctgacagaattggaacctcttagaattgcctacctgcacctatcagcctggctgacaggagcccgccaaaggattaaaaaaaaacaaaacccaaaacataaaatcatgcaaaaaaatatttacccccgaaagatgtatgtagttaaagctcagcttcctgcagcctcgatagcccctgaagtgttaatctgaagaaacagttccatgagtttccacaggccggtagtgagtctcctacacttgacctagacagacttacat

SEQ ID NO: 13 - DNA, 123 bp, Mus musculus
  source 1..123: mol_type = genomic DNA
gtttcattggtcagtttaacagcaaatgccttgggttactctgaactcggggccatcaaatccctaaggacactaagagctctgagacccctaagagccttatcacgatttgaagggatgagg

SEQ ID NO: 14 - DNA, 7597 bp, Mus musculus
  source 1..7597: mol_type = genomic DNA
gtaagaaaaaggaaaactctgcagcgttgtatattgtcaaagctaggctgagttcaacttaactaacgaaaaacacgtgcatgcaaaaggaatggcaaccctttgcaaacttgctactttacccttttctctgttgcatatttacttcttggtgatatgcaagagaaaatcggcctctttgaaaatgatttaatatcatttatctgctttgctaattaaaatgaccttagttcataatcgatcttgggagtttccttataattcctaatacaaagggggaggggcagatactctcttaaagaactaagttgagtcatgtaataattacctagagataattttgtttcatatcgttctcctctatgacagcccatcagtacttaagggatcctatggaaagtaatgtgaatcacaaatgtgtatgaatacaaaggaaaaaatgaagaattgttaaatgttttgtctttacaatgccaaaattctcattatttgaatatatccaagggcagatattaaccattgactggagtataataatactgcctcaactgtaactaaattaatgacattgaataagtaagacactaatttaattactataaatacatacacatcttatgacaatacagctgataaggaaaaagaacatgtatttttattcattgccatacatggctcgtcaaccttaacttaaacctcggttctcagttacacagagttttatgttgctcttttgagcaaagcattattcccctctccataattcaacacgtatcagatttttgcatttattggctcattgttatgatgattatttcaaagcattatacaatcatttatagaagatgtgccgtgtgaaaattatttttttattaagatccaaaatttacgctctttaaaccaatcagatgaaatgtataaggcaaagagtgctcattgtcctgacacttacaaaccaaggctccaacaaacaggctcctctctgcaccacatagagggctttcagcctgtgtccccccataaaaacctattataaattttattatactatactgtaagaaacctgtccaatttttaatttctctagcacatatgaaaacttctcttcagtagatccaagtaagcacaaaggagctttgattctcacacaagaaatcacatttgtattaaaaatgtatcataaattttctcccaattatgcaaaacttaaatgcttttccaattaaaagagcactttcgtttcagaatagcaatttcagttgtcaaggaaaacattgtttttatacattttatataaaaatacatgagctaaatttaaattcacatttttcaactttttatggtttttttatgtttctttttctttcgcattttttaacaatccagccattacctctcctccctgtccccctcctatagtttctcatctcattcctcctcccccttgcctctgagaggatgctccctccctcactaggcctccctcttccccagggcttcaagttcctcaaggattatacacatcttctcccactgagaccaggccaggcagtcctctgcttctgcccagcctgtgtatgttcctgcttggtagctcagtctctggaagctccctggggtctgggttagttgggactgctggtcttcctatggagttaccctccccttcaacttcttcaatccttcccctaattcaaccacaggtatccagacttcagtccaatggttgagtgtaaatattggcatctgtctctgtcagctgttgttaggggctcagaggacagccatgctaggctcctgcctacaagcagcacaccataacatcagtaatagtgtcaggcctttaatgaataatgctacgtatataaggttgttagattatacttcaactttgatcttttagaatattattaaatccagtcgtttattttttatatgtaatattgactttccataacaaatgagtctattttccttttgtgtagaaataactttatcaattattgttaataatgcttttgtcaattattgttgatatgcttctcttttttaaaactggagtcatcaaaacaaaaattctgggtagatattacgaagctgactccttggtcagcttggcacatagtgagaccacaaatatctcaaggtcacggcaattcctcaccaccagtttggcattgtgaagtcaaaaccaaccttctgttgattctggtttttgtatttctagtatgagacattttctactttgtaagagtatataactgtggatggcggcgaggttgggcatgatgatgattgtaagcgggaagtgagctagagtatcttcagaaactctcactttatcctccttggcagcatagaaccgcaatcgctgtgtccgagtgtcaaccaggcagtcattttgttttgggttttttgtcactctttcaaagcatgtgcttctacgcaacactaccaaacacagcatgctgcatagtgcttgagaaggagttagaaagtaacaaacgagttatcatcacgttgccctttgtgttttgcatgtcttatgcacacttttggctgacagcttttgaacatttattgtatttcaaatttccagtccaaatttttttttcaacttgtgaaattgaacggaatgaaccgatgtcgtgaatacctagggtcaaataaaacttgtatttaaattcgtagttttaatttcccaagctgggaaaatcgtaaaaaccttttccaaagaactcaagtcttagttgctagggaaacaggcagtgagcatcatatacaaaaagtaacaccaaatgttctgtcatatcagctttctaactaataataaactatatatttctattttatataggataatcttgctccaacttggatggggtggagcggtggttcctcccctcagccctttattatgggtactgtattaccccttttgctacctttaatccttgcactgtgacttatgtgtagtgggattgagggagggagtgggaagggtacaattgcaccacagtagggacaatacaggatttatttccaaatccactacttttaatgagcttaaacttcttttgggaaaaaaaaagttatctctgacttaccatctgtggattataaccccagaagtacatatctttattacgtttcactgaatatgatttagctatttatacttcattgtccatttatggggaaattactcaattggtgagggtgggggaccctggtgtaggatgctgatgaaaacgttttcatttgtcaagctcatggtagtgacagagcatatagtccttattttttcaacacactgctctggtccctcaatgggccagtcacattccatcagttgatcgttgatgtgtgcgagcagtggctaaaggtacaacaggccaggtatctcagggttgccaatggttatgatcattctcatctttattgcataaaaatgtgttatttgcagaaagtagcaaggcaagatccctgtgaaacaagggaatacaaaaaaaaaaaaagatgtgctttaagttataaaaccaaaacatgtgaaaagtcaacttcattgaagtataaagaataggatatgcatgaaaaacaaaaaaatcatgagcactaagaaattggtgtataagccaactccttgtaagctaccccaattaacttcccagaatcttagaaggcatcacagtgcaccccaaaataaaaagccaaactgacacttctgcttcctcttaaaatgtaggagtcttggataagaaagataatttttattgtttggaagaaaaaaaaattgtttggataattgaggcatttatctatcaaaaatatttatcttaataaaatttcacaacactgatttagttgttggcttttctaaaaattttttatatttcatattaagaactcatgatttttactttccattttttaaattcttattcacatatggtttttctctatttcttagaaaagctatagaacccatggtttccggtgacttaaaaaactaatctaaatgtcttcacttagatgatactttcaaatgcactgaaatttctaatatcaacaagaatatttgcctggtcctaatttttcactgatttaataaaaagtatgaaccctaaagaagaaatagacttgaagaactggttgtgtgacaatacagaaattctgctgggagatgtccttttaaaacattgttagaagagacaacctctacaatccacccattaagcatacttctctcttagacatctccttttatgtaccttataacctcaatgtgttctttccaattgacttagaccaacacttcccagcgcatcccacatgggagccaattactgactctccctagagactgcaaagaattaatattgtagaaccaagggatggttgggctcttgggagaggcaatccgtttgtgatcttttgctctggatgttaatgaaatcgcaactttaagtggattttcagtggcaaatcctctgatcctatgccaaatgttctctaagacaaacatccttgtaaaataaatgtctcactgggccaaatctatggcaaatttgcacgttttcctgaactgcattcctatatagtatttgccatcctgaattcactaatgggcattacttttaattcaaaaccagtcccttcttcaaaggaaatctctcccatttattacattatgcaaactgctttcttatgcagtggttaaatccttagccaggcaagtatgaggactggaatttggatatccagaaccctcagaaatgtcggatgggcatagtagcttacatgtaattccagagctagaaagatgaaactagccctgtcctcaagctctgaattcagttggtgcaataaataagaaagaatccccccccccgacccctacatctctttcctctacatctatacatgtatttcccatacagctctatgcttccacatatatgctcacatatgtgcatgcacacttgcacacatatgtacacttgacacattgaagcatcataatctaacaattggaatataagaaaatatttaactttcacacagagcagtcagagaaaaccataagaggttgaaactcttgaaaaaacttgcaggataaacagaaaagagtatgagatgccaattctggtctactttctgaacctaacttgttttaccttcattagtctaattttccaaatgaaccccaagcaccaaattgtccttattgctctttccagtactaaattataattcctcaattcgaaggcaaacactctcatctttgttaaggatgtgtagagttagactcaataaacgacatgtatatttgagctaaagcctggaggagggagattatttcaagggcaagtacttggcagggagtttcaaagaaagaaggctctcaattctcagactaacaccttagcgtggagtgactgtcacagaggagggtgaagtgtatgtcaccagttagggaagctgaaaggggaaatgtatcaggcttgtgagaatccttcagcagccaagtctagcacctgagcacaatccccagaactgaccccacatggtggaaaggagaggaataattcctgcaaattttcctgtgacctccacccaagtgctatagaaaatgcatgcatgcccacatgcacacacaaataaacatagttgcaaactgttttgaggaaaataacctcacaaactgtcgagtgatgtaaatgccaaagaaagagaaatgttttctaatggctagagaaccattaaggaatttttcaaaatgggacatgggatagataaatttagtatccatactgaaagaaggcaagcaaataaaatctgataagaatgtaattcttagtaaccgaggacagagcgaagatagagaacagggccaatggccaaggtggaaaggtttgaaggaagcagcatgaaacctacagacttgtaccaaaatgttcagtgtcatgagtgttaaaagtgaaaagcttgcatgttagtatggatttcatatcctcggcagacagagcacctcactgtgagtgggagatgaagtattcagaaatgagaaacaactactcaatttcagtgttcatatctcaaatccaataaacaactttaggggtacaattttttaaaaaattacattaaaatgtttttaaatctcttcttaataatttaaaaattaaattgaaaataactttaaaaagtaatatatacaggaaagcctgtgtgctaattttttagggaggccataaagggagatagttgctcattaatttctacacatcagcctatctttggcttctgccttgatagcgcactctgaattatcttcttcatgttcatccctcatctttattgttactggtttcatttcccttggccacatagcccactattttgtattccccaatggatattgttccttacaaagttcagccagggctcagaagtacaaggaattggctcttatacttctgtcagacaggcaaaaacttctaaaattatactataataaaaatcaaagagatgatattcataattaaactaacaaaagtggcaggccccccctcccccaacatgagtagaattaatctgacgtccatgttcaagtctgaaacacacttgccaattaagagcacattagggccagcctttatctccctcttagttactaatgtgcagttcaatggtgagctatagagaaggaagccaagactaccatatgtcaaatataaaaaaaaaaaatcccattttaaatctgtagtcccgaattaaggacaagagagagggaaatatctttgacattagaaaatggagaaaatattttagcacaggactttactcagtcacatcagagttgataagtacgtatgacatccctctttttcctgttttcctgagaaaatgatctctctagtgtttcatttaagataagtttattgaattaaactcagtaaatgaaacaactgacatgactggagcttgaaataaacgatgtgatgatctactgaaatacatgatgctaaattgtcttgcttcttatgcaaaaactactattagttatagcaatgcatggataattaaggccaaaaatatattagatgttaaaaatagttttatatttatacatctgaattttaatttatatttaaagtatattggtccaatcaattcatgcccaaatgttttagttctattctttgagatactgttttgttttgggatttttttttatgagctaatctcttgcctaggagttcctacttctctctcctccttttattttttctaataaactacacatgtgtcttcatccaggagctaacttctcccattttgcttttcctttagcaccttttttatattagatttctttcttttctccatctctttgcatattgcctatatttcttttcctaagcataatatttaaaaaagactgagttttatgttaagattatttctgctttgctcttacacagataggataagtagtcttgatagaaaataaatcaatgattcctagggggatgtctttttgcttttaatcaataaggattctgacttctctttctctccatttgtgtattag

SEQ ID NO: 15 - DNA, 282 bp, Mus musculus
  source 1..282: mol_type = genomic DNA
gtggttgtgaatgccctgttaggagcaattccatccatcatgaatgtgcttctggtttgccttatattctggctaattttcagcatcatgggcgtaaatttgtttgctggcaaattctaccactgtgttaacaccacaactggtgacatatttgagatcagcgaagtcaataatcattctgattgcctaaaactaatagaaagaaatgagaccgcccggtggaaaaatgtgaaagtaaactttgataatgtaggatttgggtatctttctttgcttcaagtt

SEQ ID NO: 16 - DNA, 64 bp, Mus musculus
  source 1..64: mol_type = genomic DNA
gataatcttgctccaacttggatggggtggagcggtggttcctcccctcagccctttattatgg

SEQ ID NO: 17 - RNA, 123 nt, Mus musculus
  source 1..123: mol_type = genomic RNA
gtttcattggtcagtttaacagcaaatgccttgggttactctgaactcggggccatcaaatccctaaggacactaagagctctgagacccctaagagccttatcacgatttgaagggatgagg

SEQ ID NO: 18 - RNA, 7597 nt, Mus musculus
  source 1..7597: mol_type = genomic RNA
gtaagaaaaaggaaaactctgcagcgttgtatattgtcaaagctaggctgagttcaacttaactaacgaaaaacacgtgcatgcaaaaggaatggcaaccctttgcaaacttgctactttacccttttctctgttgcatatttacttcttggtgatatgcaagagaaaatcggcctctttgaaaatgatttaatatcatttatctgctttgctaattaaaatgaccttagttcataatcgatcttgggagtttccttataattcctaatacaaagggggaggggcagatactctcttaaagaactaagttgagtcatgtaataattacctagagataattttgtttcatatcgttctcctctatgacagcccatcagtacttaagggatcctatggaaagtaatgtgaatcacaaatgtgtatgaatacaaaggaaaaaatgaagaattgttaaatgttttgtctttacaatgccaaaattctcattatttgaatatatccaagggcagatattaaccattgactggagtataataatactgcctcaactgtaactaaattaatgacattgaataagtaagacactaatttaattactataaatacatacacatcttatgacaatacagctgataaggaaaaagaacatgtatttttattcattgccatacatggctcgtcaaccttaacttaaacctcggttctcagttacacagagttttatgttgctcttttgagcaaagcattattcccctctccataattcaacacgtatcagatttttgcatttattggctcattgttatgatgattatttcaaagcattatacaatcatttatagaagatgtgccgtgtgaaaattatttttttattaagatccaaaatttacgctctttaaaccaatcagatgaaatgtataaggcaaagagtgctcattgtcctgacacttacaaaccaaggctccaacaaacaggctcctctctgcaccacatagagggctttcagcctgtgtccccccataaaaacctattataaattttattatactatactgtaagaaacctgtccaatttttaatttctctagcacatatgaaaacttctcttcagtagatccaagtaagcacaaaggagctttgattctcacacaagaaatcacatttgtattaaaaatgtatcataaattttctcccaattatgcaaaacttaaatgcttttccaattaaaagagcactttcgtttcagaatagcaatttcagttgtcaaggaaaacattgtttttatacattttatataaaaatacatgagctaaatttaaattcacatttttcaactttttatggtttttttatgtttctttttctttcgcattttttaacaatccagccattacctctcctccctgtccccctcctatagtttctcatctcattcctcctcccccttgcctctgagaggatgctccctccctcactaggcctccctcttccccagggcttcaagttcctcaaggattatacacatcttctcccactgagaccaggccaggcagtcctctgcttctgcccagcctgtgtatgttcctgcttggtagctcagtctctggaagctccctggggtctgggttagttgggactgctggtcttcctatggagttaccctccccttcaacttcttcaatccttcccctaattcaaccacaggtatccagacttcagtccaatggttgagtgtaaatattggcatctgtctctgtcagctgttgttaggggctcagaggacagccatgctaggctcctgcctacaagcagcacaccataacatcagtaatagtgtcaggcctttaatgaataatgctacgtatataaggttgttagattatacttcaactttgatcttttagaatattattaaatccagtcgtttattttttatatgtaatattgactttccataacaaatgagtctattttccttttgtgtagaaataactttatcaattattgttaataatgcttttgtcaattattgttgatatgcttctcttttttaaaactggagtcatcaaaacaaaaattctgggtagatattacgaagctgactccttggtcagcttggcacatagtgagaccacaaatatctcaaggtcacggcaattcctcaccaccagtttggcattgtgaagtcaaaaccaaccttctgttgattctggtttttgtatttctagtatgagacattttctactttgtaagagtatataactgtggatggcggcgaggttgggcatgatgatgattgtaagcgggaagtgagctagagtatcttcagaaactctcactttatcctccttggcagcatagaaccgcaatcgctgtgtccgagtgtcaaccaggcagtcattttgttttgggttttttgtcactctttcaaagcatgtgcttctacgcaacactaccaaacacagcatgctgcatagtgcttgagaaggagttagaaagtaacaaacgagttatcatcacgttgccctttgtgttttgcatgtcttatgcacacttttggctgacagcttttgaacatttattgtatttcaaatttccagtccaaatttttttttcaacttgtgaaattgaacggaatgaaccgatgtcgtgaatacctagggtcaaataaaacttgtatttaaattcgtagttttaatttcccaagctgggaaaatcgtaaaaaccttttccaaagaactcaagtcttagttgctagggaaacaggcagtgagcatcatatacaaaaagtaacaccaaatgttctgtcatatcagctttctaactaataataaactatatatttctattttatataggataatcttgctccaacttggatggggtggagcggtggttcctcccctcagccctttattatgggtactgtattaccccttttgctacctttaatccttgcactgtgacttatgtgtagtgggattgagggagggagtgggaagggtacaattgcaccacagtagggacaatacaggatttatttccaaatccactacttttaatgagcttaaacttcttttgggaaaaaaaaagttatctctgacttaccatctgtggattataaccccagaagtacatatctttattacgtttcactgaatatgatttagctatttatacttcattgtccatttatggggaaattactcaattggtgagggtgggggaccctggtgtaggatgctgatgaaaacgttttcatttgtcaagctcatggtagtgacagagcatatagtccttattttttcaacacactgctctggtccctcaatgggccagtcacattccatcagttgatcgttgatgtgtgcgagcagtggctaaaggtacaacaggccaggtatctcagggttgccaatggttatgatcattctcatctttattgcataaaaatgtgttatttgcagaaagtagcaaggcaagatccctgtgaaacaagggaatacaaaaaaaaaaaaagatgtgctttaagttataaaaccaaaacatgtgaaaagtcaacttcattgaagtataaagaataggatatgcatgaaaaacaaaaaaatcatgagcactaagaaattggtgtataagccaactccttgtaagctaccccaattaacttcccagaatcttagaaggcatcacagtgcaccccaaaataaaaagccaaactgacacttctgcttcctcttaaaatgtaggagtcttggataagaaagataatttttattgtttggaagaaaaaaaaattgtttggataattgaggcatttatctatcaaaaatatttatcttaataaaatttcacaacactgatttagttgttggcttttctaaaaattttttatatttcatattaagaactcatgatttttactttccattttttaaattcttattcacatatggtttttctctatttcttagaaaagctatagaacccatggtttccggtgacttaaaaaactaatctaaatgtcttcacttagatgatactttcaaatgcactgaaatttctaatatcaacaagaatatttgcctggtcctaatttttcactgatttaataaaaagtatgaaccctaaagaagaaatagacttgaagaactggttgtgtgacaatacagaaattctgctgggagatgtccttttaaaacattgttagaagagacaacctctacaatccacccattaagcatacttctctcttagacatctccttttatgtaccttataacctcaatgtgttctttccaattgacttagaccaacacttcccagcgcatcccacatgggagccaattactgactctccctagagactgcaaagaattaatattgtagaaccaagggatggttgggctcttgggagaggcaatccgtttgtgatcttttgctctggatgttaatgaaatcgcaactttaagtggattttcagtggcaaatcctctgatcctatgccaaatgttctctaagacaaacatccttgtaaaataaatgtctcactgggccaaatctatggcaaatttgcacgttttcctgaactgcattcctatatagtatttgccatcctgaattcactaatgggcattacttttaattcaaaaccagtcccttcttcaaaggaaatctctcccatttattacattatgcaaactgctttcttatgcagtggttaaatccttagccaggcaagtatgaggactggaatttggatatccagaaccctcagaaatgtcggatgggcatagtagcttacatgtaattccagagctagaaagatgaaactagccctgtcctcaagctctgaattcagttggtgcaataaataagaaagaatccccccccccgacccctacatctctttcctctacatctatacatgtatttcccatacagctctatgcttccacatatatgctcacatatgtgcatgcacacttgcacacatatgtacacttgacacattgaagcatcataatctaacaattggaatataagaaaatatttaactttcacacagagcagtcagagaaaaccataagaggttgaaactcttgaaaaaacttgcaggataaacagaaaagagtatgagatgccaattctggtctactttctgaacctaacttgttttaccttcattagtctaattttccaaatgaaccccaagcaccaaattgtccttattgctctttccagtactaaattataattcctcaattcgaaggcaaacactctcatctttgttaaggatgtgtagagttagactcaataaacgacatgtatatttgagctaaagcctggaggagggagattatttcaagggcaagtacttggcagggagtttcaaagaaagaaggctctcaattctcagactaacaccttagcgtggagtgactgtcacagaggagggtgaagtgtatgtcaccagttagggaagctgaaaggggaaatgtatcaggcttgtgagaatccttcagcagccaagtctagcacctgagcacaatccccagaactgaccccacatggtggaaaggagaggaataattcctgcaaattttcctgtgacctccacccaagtgctatagaaaatgcatgcatgcccacatgcacacacaaataaacatagttgcaaactgttttgaggaaaataacctcacaaactgtcgagtgatgtaaatgccaaagaaagagaaatgttttctaatggctagagaaccattaaggaatttttcaaaatgggacatgggatagataaatttagtatccatactgaaagaaggcaagcaaataaaatctgataagaatgtaattcttagtaaccgaggacagagcgaagatagagaacagggccaatggccaaggtggaaaggtttgaaggaagcagcatgaaacctacagacttgtaccaaaatgttcagtgtcatgagtgttaaaagtgaaaagcttgcatgttagtatggatttcatatcctcggcagacagagcacctcactgtgagtgggagatgaagtattcagaaatgagaaacaactactcaatttcagtgttcatatctcaaatccaataaacaactttaggggtacaattttttaaaaaattacattaaaatgtttttaaatctcttcttaataatttaaaaattaaattgaaaataactttaaaaagtaatatatacaggaaagcctgtgtgctaattttttagggaggccataaagggagatagttgctcattaatttctacacatcagcctatctttggcttctgccttgatagcgcactctgaattatcttcttcatgttcatccctcatctttattgttactggtttcatttcccttggccacatagcccactattttgtattccccaatggatattgttccttacaaagttcagccagggctcagaagtacaaggaattggctcttatacttctgtcagacaggcaaaaacttctaaaattatactataataaaaatcaaagagatgatattcataattaaactaacaaaagtggcaggccccccctcccccaacatgagtagaattaatctgacgtccatgttcaagtctgaaacacacttgccaattaagagcacattagggccagcctttatctccctcttagttactaatgtgcagttcaatggtgagctatagagaaggaagccaagactaccatatgtcaaatataaaaaaaaaaaatcccattttaaatctgtagtcccgaattaaggacaagagagagggaaatatctttgacattagaaaatggagaaaatattttagcacaggactttactcagtcacatcagagttgataagtacgtatgacatccctctttttcctgttttcctgagaaaatgatctctctagtgtttcatttaagataagtttattgaattaaactcagtaaatgaaacaactgacatgactggagcttgaaataaacgatgtgatgatctactgaaatacatgatgctaaattgtcttgcttcttatgcaaaaactactattagttatagcaatgcatggataattaaggccaaaaatatattagatgttaaaaatagttttatatttatacatctgaattttaatttatatttaaagtatattggtccaatcaattcatgcccaaatgttttagttctattctttgagatactgttttgttttgggatttttttttatgagctaatctcttgcctaggagttcctacttctctctcctccttttattttttctaataaactacacatgtgtcttcatccaggagctaacttctcccattttgcttttcctttagcaccttttttatattagatttctttcttttctccatctctttgcatattgcctatatttcttttcctaagcataatatttaaaaaagactgagttttatgttaagattatttctgctttgctcttacacagataggataagtagtcttgatagaaaataaatcaatgattcctagggggatgtctttttgcttttaatcaataaggattctgacttctctttctctccatttgtgtattag

SEQ ID NO: 19 - RNA, 282 nt, Mus musculus
  source 1..282: mol_type = genomic RNA
gtggttgtgaatgccctgttaggagcaattccatccatcatgaatgtgcttctggtttgccttatattctggctaattttcagcatcatgggcgtaaatttgtttgctggcaaattctaccactgtgttaacaccacaactggtgacatatttgagatcagcgaagtcaataatcattctgattgcctaaaactaatagaaagaaatgagaccgcccggtggaaaaatgtgaaagtaaactttgataatgtaggatttgggtatctttctttgcttcaagtt

SEQ ID NO: 20 - RNA, 64 nt, Mus musculus
  source 1..64: mol_type = genomic RNA
gataatcttgctccaacttggatggggtggagcggtggttcctcccctcagccctttattatgg

SEQ ID NO: 21 - DNA, 18 bp, synthetic construct
  source 1..18: mol_type = other DNA
gatgctctccgtctgttt

SEQ ID NO: 22 - DNA, 18 bp, synthetic construct
  source 1..18: mol_type = other DNA
ttcatgatgctctccgtc

SEQ ID NO: 23 - DNA, 18 bp, synthetic construct
  source 1..18: mol_type = other DNA
ttttgttcatgatgctct

SEQ ID NO: 24 - DNA, 18 bp, synthetic construct
  source 1..18: mol_type = other DNA
ttactttttgttcatgat

SEQ ID NO: 25 - DNA, 18 bp, synthetic construct
  source 1..18: mol_type = other DNA
tggtgttactttttgttc

SEQ ID NO: 26 - DNA, 18 bp, synthetic construct
  source 1..18: mol_type = other DNA
acatttggtgttactttt

SEQ ID NO: 27 - DNA, 18 bp, synthetic construct
  source 1..18: mol_type = other DNA
acagaacatttggtgtta

SEQ ID NO: 28 - DNA, 18 bp, synthetic construct
  source 1..18: mol_type = other DNA
atatgacagaacatttgg

SEQ ID NO: 29 - DNA, 18 bp, synthetic construct
  source 1..18: mol_type = other DNA
atctgatatgacagaaca

SEQ ID NO: 30 - DNA, 18 bp, synthetic construct
  source 1..18: mol_type = other DNA
tagaaatctgatatgaca

SEQ ID NO: 31 - DNA, 18 bp, synthetic construct
  source 1..18: mol_type = other DNA
ttagttagaaatctgata

SEQ ID NO: 32 - DNA, 18 bp, synthetic construct
  source 1..18: mol_type = other DNA
tgttattagttagaaatc

SEQ ID NO: 33 - DNA, 18 bp, synthetic construct
  source 1..18: mol_type = other DNA
tagtttgttattagttag

SEQ ID NO: 34 - DNA, 18 bp, synthetic construct
  source 1..18: mol_type = other DNA
atatatagtttgttatta

SEQ ID NO: 35 - DNA, 18 bp, synthetic construct
  source 1..18: mol_type = other DNA
tagaaatatatagtttgt

SEQ ID NO: 36 - DNA, 18 bp, synthetic construct
  source 1..18: mol_type = other DNA
caaaatagaaatatatag

SEQ ID NO: 37 - DNA, 18 bp, synthetic construct
  source 1..18: mol_type = other DNA
atacaaaatagaaatata

SEQ ID NO: 38 - DNA, 18 bp, synthetic construct
  source 1..18: mol_type = other DNA
ctatacaaaatagaaata

SEQ ID NO: 39 - DNA, 18 bp, synthetic construct
  source 1..18: mol_type = other DNA
tcctatacaaaatagaaa

SEQ ID NO: 40 - DNA, 18 bp, synthetic construct
  source 1..18: mol_type = other DNA
tatcctatacaaaataga

SEQ ID NO: 41 - DNA, 18 bp, synthetic construct
  source 1..18: mol_type = other DNA
attatcctatacaaaata

SEQ ID NO: 42 - DNA, 18 bp, synthetic construct
  source 1..18: mol_type = other DNA
agttggagcaagattatc

SEQ ID NO: 43 - DNA, 18 bp, synthetic construct
  source 1..18: mol_type = other DNA
atccaagttggagcaaga

SEQ ID NO: 44 - DNA, 18 bp, synthetic construct
  source 1..18: mol_type = other DNA
accccatccaagttggag

SEQ ID NO: 45 - DNA, 18 bp, synthetic construct
  source 1..18: mol_type = other DNA
gctccaccccatccaagt

SEQ ID NO: 46 - DNA, 18 bp, synthetic construct
  source 1..18: mol_type = other DNA
ccagcgctccaccccatc

SEQ ID NO: 47 - DNA, 18 bp, synthetic construct
  source 1..18: mol_type = other DNA
gaaccagcgctccacccc

SEQ ID NO: 48 - DNA, 18 bp, synthetic construct
  source 1..18: mol_type = other DNA
gggaggaaccagcgctcc

SEQ ID NO: 49 - DNA, 18 bp, synthetic construct
  source 1..18: mol_type = other DNA
ataataaagggctcaggg

SEQ ID NO: 50 - DNA, 18 bp, synthetic construct
  source 1..18: mol_type = other DNA
ccataataaagggctcag

SEQ ID NO: 51 - DNA, 18 bp, synthetic construct
  source 1..18: mol_type = other DNA
gtaatacagtacccataa

SEQ ID NO: 52 - DNA, 18 bp, synthetic construct
  source 1..18: mol_type = other DNA
gggtaatacagtacccat

SEQ ID NO: 53 - DNA, 18 bp, synthetic construct
  source 1..18: mol_type = other DNA
ttaaaggtagcaaaaggg

SEQ ID NO: 54 - DNA, 18 bp, synthetic construct
  source 1..18: mol_type = other DNA
aaggattaaaggtagcaa

SEQ ID NO: 55 - DNA, 18 bp, synthetic construct
  source 1..18: mol_type = other DNA
agtgcaaggattaaaggt

SEQ ID NO: 56 - DNA, 18 bp, synthetic construct
  source 1..18: mol_type = other DNA
gtcacagtgcaaggatta

SEQ ID NO: 57 - DNA, 18 bp, synthetic construct
  source 1..18: mol_type = other DNA
cataagtcacagtgcaag

SEQ ID NO: 58 - DNA, 18 bp, synthetic construct
  source 1..18: mol_type = other DNA
ctacacataagtcacagt

SEQ ID NO: 59 - DNA, 18 bp, synthetic construct
  source 1..18: mol_type = other DNA
ccccactacacataagtc

SEQ ID NO: 60 - DNA, 18 bp, synthetic construct
  source 1..18: mol_type = other DNA
cctcaccccactacacat

SEQ ID NO: 61 - DNA, 18 bp, synthetic construct
  source 1..18: mol_type = other DNA
ccctccctcaccccacta

SEQ ID NO: 62 - DNA, 18 bp, synthetic construct
  source 1..18: mol_type = other DNA
ccaatccctccctcaccc

SEQ ID NO: 63 - DNA, 18 bp, synthetic construct
  source 1..18: mol_type = other DNA
ccttcccaatccctccct

SEQ ID NO: 64 - DNA, 18 bp, synthetic construct
  source 1..18: mol_type = other DNA
agtacccttcccaatccc

SEQ ID NO: 65 - DNA, 18 bp, synthetic construct
  source 1..18: mol_type = other DNA
ataatagtacccttccca

SEQ ID NO: 66 - DNA, 18 bp, synthetic construct
  source 1..18: mol_type = other DNA
gtgcaataatagtaccct

SEQ ID NO: 67 - DNA, 18 bp, synthetic construct
  source 1..18: mol_type = other DNA
ctgtggtgcaataatagt

SEQ ID NO: 68 - DNA, 18 bp, synthetic construct
  source 1..18: mol_type = other DNA
gatgctcactgcctgttt

SEQ ID NO: 69 - DNA, 18 bp, synthetic construct
  source 1..18: mol_type = other DNA
tatatgatgctcactgcc

SEQ ID NO: 70 - DNA, 18 bp, synthetic construct
  source 1..18: mol_type = other DNA
ttttgtatatgatgctca

SEQ ID NO: 71 - DNA, 18 bp, synthetic construct
  source 1..18: mol_type = other DNA
ttactttttgtatatgat

SEQ ID NO: 72 - DNA, 18 bp, synthetic construct
  source 1..18: mol_type = other DNA
tggtgttactttttgtat

SEQ ID NO: 73 - DNA, 18 bp, synthetic construct
  source 1..18: mol_type = other DNA
acatttggtgttactttt

SEQ ID NO: 74 - DNA, 18 bp, synthetic construct
  source 1..18: mol_type = other DNA
acagaacatttggtgtta

SEQ ID NO: 75 - DNA, 18 bp, synthetic construct
  source 1..18: mol_type = other DNA
atatgacagaacatttgg

SEQ ID NO: 76 - DNA, 18 bp, synthetic construct
  source 1..18: mol_type = other DNA
agctgatatgacagaaca

SEQ ID NO: 77 - DNA, 18 bp, synthetic construct
  source 1..18: mol_type = other DNA
tagaaagctgatatgaca

SEQ ID NO: 78 - DNA, 18 bp, synthetic construct
  source 1..18: mol_type = other DNA
ttagttagaaagctgata

SEQ ID NO: 79 - DNA, 18 bp, synthetic construct
  source 1..18: mol_type = other DNA
tattattagttagaaagc

SEQ ID NO: 80 - DNA, 18 bp, synthetic construct
  source 1..18: mol_type = other DNA
tagtttattattagttag

SEQ ID NO: 81 - DNA, 18 bp, synthetic construct
  source 1..18: mol_type = other DNA
atatatagtttattatta

SEQ ID NO: 82 - DNA, 18 bp, synthetic construct
  source 1..18: mol_type = other DNA
tagaaatatatagtttat

SEQ ID NO: 83 - DNA, 18 bp, synthetic construct
  source 1..18: mol_type = other DNA
taaaatagaaatatatag

SEQ ID NO: 84 - DNA, 18 bp, synthetic construct
  source 1..18: mol_type = other DNA
atataaaatagaaatata

SEQ ID NO: 85 - DNA, 18 bp, synthetic construct
  source 1..18: mol_type = other DNA
ctatataaaatagaaata

SEQ ID NO: 86 - DNA, 18 bp, synthetic construct
  source 1..18: mol_type = other DNA
tcctatataaaatagaaa

SEQ ID NO: 87 - DNA, 18 bp, synthetic construct
  source 1..18: mol_type = other DNA
tatcctatataaaataga

SEQ ID NO: 88 - DNA, 18 bp, synthetic construct
  source 1..18: mol_type = other DNA
attatcctatataaaata

SEQ ID NO: 89 - DNA, 18 bp, synthetic construct
  source 1..18: mol_type = other DNA
agttggagcaagattatc

SEQ ID NO: 90 - DNA, 18 bp, synthetic construct
  source 1..18: mol_type = other DNA
atccaagttggagcaaga

SEQ ID NO: 91 - DNA, 18 bp, synthetic construct
  source 1..18: mol_type = other DNA
accccatccaagttggag

SEQ ID NO: 92 - DNA, 18 bp, synthetic construct
  source 1..18: mol_type = other DNA
gctccaccccatccaagt

SEQ ID NO: 93 - DNA, 18 bp, synthetic construct
  source 1..18: mol_type = other DNA
ccaccgctccaccccatc

SEQ ID NO: 94 - DNA, 18 bp, synthetic construct
  source 1..18: mol_type = other DNA
gaaccaccgctccacccc

SEQ ID NO: 95 - DNA, 18 bp, synthetic construct
  source 1..18: mol_type = other DNA
gggaggaaccaccgctcc

SEQ ID NO: 96 - DNA, 18 bp, synthetic construct
  source 1..18: mol_type = other DNA
ataataaagggctgaggg

SEQ ID NO: 97 - DNA, 18 bp, synthetic construct
  source 1..18: mol_type = other DNA
ccataataaagggctgag

SEQ ID NO: 98 - DNA, 18 bp, synthetic construct
  source 1..18: mol_type = other DNA
gtaatacagtacccataa

SEQ ID NO: 99 - DNA, 18 bp, synthetic construct
  source 1..18: mol_type = other DNA
gggtaatacagtacccat

SEQ ID NO: 100 - DNA, 18 bp, synthetic construct
  source 1..18: mol_type = other DNA
ttaaaggtagcaaaaggg

SEQ ID NO: 101 - DNA, 18 bp, synthetic construct
  source 1..18: mol_type = other DNA
aaggattaaaggtagcaa

SEQ ID NO: 102 - DNA, 18 bp, synthetic construct
  source 1..18: mol_type = other DNA
agtgcaaggattaaaggt

SEQ ID NO: 103 - DNA, 18 bp, synthetic construct
  source 1..18: mol_type = other DNA
gtcacagtgcaaggatta

SEQ ID NO: 104 - DNA, 18 bp, synthetic construct
  source 1..18: mol_type = other DNA
cataagtcacagtgcaag

SEQ ID NO: 105 - DNA, 18 bp, synthetic construct
  source 1..18: mol_type = other DNA
ctacacataagtcacagt

SEQ ID NO: 106 - DNA, 18 bp, synthetic construct
  source 1..18: mol_type = other DNA
tcccactacacataagtc

SEQ ID NO: 107 - DNA, 18 bp, synthetic construct
  source 1..18: mol_type = other DNA
ctcaatcccactacacat

SEQ ID NO: 108 - DNA, 18 bp, synthetic construct
  source 1..18: mol_type = other DNA
cctccctcaatcccacta

SEQ ID NO: 109 - DNA, 18 bp, synthetic construct
  source 1..18: mol_type = other DNA
cactccctccctcaatcc

SEQ ID NO: 110 - DNA, 18 bp, synthetic construct
  source 1..18: mol_type = other DNA
cttcccactccctccctc

SEQ ID NO: 111 - DNA, 18 bp, synthetic construct
  source 1..18: mol_type = other DNA
gtacccttcccactccct

SEQ ID NO: 112 - DNA, 18 bp, synthetic construct
  source 1..18: mol_type = other DNA
caattgtacccttcccac

SEQ ID NO: 113 - DNA, 18 bp, synthetic construct
  source 1..18: mol_type = other DNA
tggtgcaattgtaccctt

SEQ ID NO: 114 - DNA, 18 bp, synthetic construct
  source 1..18: mol_type = other DNA
tactgtggtgcaattgta

SEQ ID NO: 115 - RNA, 18 nt, synthetic construct
  source 1..18: mol_type = other RNA
cagagaaaatagtgttca

SEQ ID NO: 116 - RNA, 18 nt, synthetic construct
  source 1..18: mol_type = other RNA
atattcagagaaaatagt

SEQ ID NO: 117 - RNA, 18 nt, synthetic construct
  source 1..18: mol_type = other RNA
taaaaatattcagagaaa

SEQ ID NO: 118 - RNA, 18 nt, synthetic construct
  source 1..18: mol_type = other RNA
aacaataaaaatattcag

SEQ ID NO: 119 - RNA, 18 nt, synthetic construct
  source 1..18: mol_type = other RNA
ttccaaacaataaaaata

SEQ ID NO: 120 - RNA, 18 nt, synthetic construct
  source 1..18: mol_type = other RNA
tattattccaaacaataa

SEQ ID NO: 121 - RNA, 18 nt, synthetic construct
  source 1..18: mol_type = other RNA
tttgttattattccaaac

SEQ ID NO: 122 - RNA, 18 nt, synthetic construct
  source 1..18: mol_type = other RNA
attattttgttattattc

SEQ ID NO: 123 - RNA, 18 nt, synthetic construct
  source 1..18: mol_type = other RNA
atgtcattattttgttat

SEQ ID NO: 124 - RNA, 18 nt, synthetic construct
  source 1..18: mol_type = other RNA
gatgtatgtcattatttt

SEQ ID NO: 125 - RNA, 18 nt, synthetic construct
  source 1..18: mol_type = other RNA
taatagatgtatgtcatt

SEQ ID NO: 126 - RNA, 18 nt, synthetic construct
  source 1..18: mol_type = other RNA
ctaaataatagatgtatg

SEQ ID NO: 127 - RNA, 18 nt, synthetic construct
  source 1..18: mol_type = other RNA
aggaactaaataatagat

SEQ ID NO: 128 - RNA, 18 nt, synthetic construct
  source 1..18: mol_type = other RNA
ttcttaggaactaaataa

SEQ ID NO: 129 - RNA, 18 nt, synthetic construct
  source 1..18: mol_type = other RNA
actttttcttaggaacta

SEQ ID NO: 130 - RNA, 18 nt, synthetic construct
  source 1..18: mol_type = other RNA
tatatactttttcttagg

SEQ ID NO: 131 - RNA, 18 nt, synthetic construct
  source 1..18: mol_type = other RNA
tgcatgttttactttgga

SEQ ID NO: 132 - RNA, 18 nt, synthetic construct
  source 1..18: mol_type = other RNA
gttttactttggagtaaa

SEQ ID NO: 133 - RNA, 18 nt, synthetic construct
  source 1..18: mol_type = other RNA
actttggagtaaaaataa

SEQ ID NO: 134 - RNA, 18 nt, synthetic construct
  source 1..18: mol_type = other RNA
ggagtaaaaataatttag

SEQ ID NO: 135 - RNA, 18 nt, synthetic construct
  source 1..18: mol_type = other RNA
aaaaataatttagacctg

SEQ ID NO: 136 - RNA, 18 nt, synthetic construct
  source 1..18: mol_type = other RNA
taatttagacctgatgtt

SEQ ID NO: 137 - RNA, 18 nt, synthetic construct
  source 1..18: mol_type = other RNA
tagacctgatgtttaata

SEQ ID NO: 138 - RNA, 18 nt, synthetic construct
  source 1..18: mol_type = other RNA
ctgatgtttaataaatat

SEQ ID NO: 139 - RNA, 18 nt, synthetic construct
  source 1..18: mol_type = other RNA
gtttaataaatattctta

SEQ ID NO: 140 - RNA, 18 nt, synthetic construct
  source 1..18: mol_type = other RNA
ataaatattcttactgat

SEQ ID NO: 141 - RNA, 18 nt, synthetic construct
  source 1..18: mol_type = other RNA
tattcttactgatataat

SEQ ID NO: 142 - RNA, 18 nt, synthetic construct
  source 1..18: mol_type = other RNA
ttactgatataattttca

SEQ ID NO: 143 - RNA, 18 nt, synthetic construct
  source 1..18: mol_type = other RNA
gatataattttcaaaagg

SEQ ID NO: 144 - RNA, 18 nt, synthetic construct
  source 1..18: mol_type = other RNA
aattttcaaaagggaata

SEQ ID NO: 145 - RNA, 18 nt, synthetic construct
  source 1..18: mol_type = other RNA
ctttggagtaaaaataat

SEQ ID NO: 146 - RNA, 18 nt, synthetic construct
  source 1..18: mol_type = other RNA
tttggagtaaaaataatt

SEQ ID NO: 147 - skipped

SEQ ID NO: 148 - RNA, 18 nt, synthetic construct
  source 1..18: mol_type = other RNA
ttggagtaaaaataattt

SEQ ID NO: 149 - RNA, 18 nt, synthetic construct
  source 1..18: mol_type = other RNA
tggagtaaaaataattta

SEQ ID NO: 150 - RNA, 18 nt, synthetic construct
  source 1..18: mol_type = other RNA
gagtaaaaataatttaga

SEQ ID NO: 151 - RNA, 18 nt, synthetic construct
  source 1..18: mol_type = other RNA
agtaaaaataatttagac

SEQ ID NO: 152 - RNA, 18 nt, synthetic construct
  source 1..18: mol_type = other RNA
gtaaaaataatttagacc

SEQ ID NO: 153 - RNA, 18 nt, synthetic construct
  source 1..18: mol_type = other RNA
taaaaataatttagacct

SEQ ID NO: 154 - RNA, 18 nt, synthetic construct
  source 1..18: mol_type = other RNA
tactgatataattttcaa

SEQ ID NO: 155 - RNA, 18 nt, synthetic construct
  source 1..18: mol_type = other RNA
actgatataattttcaaa

SEQ ID NO: 156 - RNA, 18 nt, synthetic construct
  source 1..18: mol_type = other RNA
ctgatataattttcaaaa

SEQ ID NO: 157 - RNA, 18 nt, synthetic construct
  source 1..18: mol_type = other RNA
tgatataattttcaaaag

SEQ ID NO: 158 - RNA, 18 nt, synthetic construct
  source 1..18: mol_type = other RNA
atataattttcaaaaggg

SEQ ID NO: 159 - RNA, 18 nt, synthetic construct
  source 1..18: mol_type = other RNA
tataattttcaaaaggga

SEQ ID NO: 160 - RNA, 18 nt, synthetic construct
  source 1..18: mol_type = other RNA
ataattttcaaaagggaa

SEQ ID NO: 161 - RNA, 18 nt, synthetic construct
  source 1..18: mol_type = other RNA
taattttcaaaagggaat

SEQ ID NO: 162 - RNA, 18 nt, synthetic construct
  source 1..18: mol_type = other RNA
caaggattaaaggtagca

SEQ ID NO: 163 - DNA, 18 bp, synthetic construct
  source 1..18: mol_type = other DNA
cagagaaaatagtgttca

SEQ ID NO: 164 - DNA, 18 bp, synthetic construct
  source 1..18: mol_type = other DNA
atattcagagaaaatagt

SEQ ID NO: 165 - DNA, 18 bp, synthetic construct
  source 1..18: mol_type = other DNA
taaaaatattcagagaaa

SEQ ID NO: 166 - DNA, 18 bp, synthetic construct
  source 1..18: mol_type = other DNA
aacaataaaaatattcag

SEQ ID NO: 167 - DNA, 18 bp, synthetic construct
  source 1..18: mol_type = other DNA
ttccaaacaataaaaata

SEQ ID NO: 168 - DNA, 18 bp, synthetic construct
  source 1..18: mol_type = other DNA
tattattccaaacaataa

SEQ ID NO: 169 - DNA, 18 bp, synthetic construct
  source 1..18: mol_type = other DNA
tttgttattattccaaac

SEQ ID NO: 170 - DNA, 18 bp, synthetic construct
  source 1..18: mol_type = other DNA
attattttgttattattc

SEQ ID NO: 171 - DNA, 18 bp, synthetic construct
  source 1..18: mol_type = other DNA
atgtcattattttgttat

SEQ ID NO: 172 - DNA, 18 bp, synthetic construct
  source 1..18: mol_type = other DNA
gatgtatgtcattatttt

SEQ ID NO: 173 - DNA, 18 bp, synthetic construct
  source 1..18: mol_type = other DNA
taatagatgtatgtcatt

SEQ ID NO: 174 - DNA, 18 bp, synthetic construct
  source 1..18: mol_type = other DNA
ctaaataatagatgtatg

SEQ ID NO: 175 - DNA, 18 bp, synthetic construct
  source 1..18: mol_type = other DNA
aggaactaaataatagat

SEQ ID NO: 176 - DNA, 18 bp, synthetic construct
  source 1..18: mol_type = other DNA
ttcttaggaactaaataa

SEQ ID NO: 177 - DNA, 18 bp, synthetic construct
  source 1..18: mol_type = other DNA
actttttcttaggaacta

SEQ ID NO: 178 - DNA, 18 bp, synthetic construct
  source 1..18: mol_type = other DNA
tatatactttttcttagg

SEQ ID NO: 179 - DNA, 18 bp, synthetic construct
  source 1..18: mol_type = other DNA
tgcatgttttactttgga

SEQ ID NO: 180 - DNA, 18 bp, synthetic construct
  source 1..18: mol_type = other DNA
gttttactttggagtaaa

SEQ ID NO: 181 - DNA, 18 bp, synthetic construct
  source 1..18: mol_type = other DNA
actttggagtaaaaataa

SEQ ID NO: 182 - DNA, 18 bp, synthetic construct
  source 1..18: mol_type = other DNA
ggagtaaaaataatttag

SEQ ID NO: 183 - DNA, 18 bp, synthetic construct
  source 1..18: mol_type = other DNA
aaaaataatttagacctg

SEQ ID NO: 184 - DNA, 18 bp, synthetic construct
  source 1..18: mol_type = other DNA
taatttagacctgatgtt

SEQ ID NO: 185 - DNA, 18 bp, synthetic construct
  source 1..18: mol_type = other DNA
tagacctgatgtttaata

SEQ ID NO: 186 - DNA, 18 bp, synthetic construct
  source 1..18: mol_type = other DNA
ctgatgtttaataaatat

SEQ ID NO: 187 - DNA, 18 bp, synthetic construct
  source 1..18: mol_type = other DNA
gtttaataaatattctta

SEQ ID NO: 188 - DNA, 18 bp, synthetic construct
  source 1..18: mol_type = other DNA
ataaatattcttactgat

SEQ ID NO: 189 - DNA, 18 bp, synthetic construct
  source 1..18: mol_type = other DNA
tattcttactgatataat

SEQ ID NO: 190 - DNA, 18 bp, synthetic construct
  source 1..18: mol_type = other DNA
ttactgatataattttca

SEQ ID NO: 191 - DNA, 18 bp, synthetic construct
  source 1..18: mol_type = other DNA
gatataattttcaaaagg

SEQ ID NO: 192 - DNA, 18 bp, synthetic construct
  source 1..18: mol_type = other DNA
aattttcaaaagggaata

SEQ ID NO: 193 - DNA, 18 bp, synthetic construct
  source 1..18: mol_type = other DNA
ctttggagtaaaaataat

SEQ ID NO: 194 - DNA, 18 bp, synthetic construct
  source 1..18: mol_type = other DNA
tttggagtaaaaataatt

SEQ ID NO: 195 - DNA, 18 bp, synthetic construct
  source 1..18: mol_type = other DNA
ttggagtaaaaataattt

SEQ ID NO: 196 - DNA, 18 bp, synthetic construct
  source 1..18: mol_type = other DNA
tggagtaaaaataattta

SEQ ID NO: 197 - DNA, 18 bp, synthetic construct
  source 1..18: mol_type = other DNA
gagtaaaaataatttaga

SEQ ID NO: 198 - DNA, 18 bp, synthetic construct
  source 1..18: mol_type = other DNA
agtaaaaataatttagac

SEQ ID NO: 199 - DNA, 18 bp, synthetic construct
  source 1..18: mol_type = other DNA
gtaaaaataatttagacc

SEQ ID NO: 200 - DNA, 18 bp, synthetic construct
  source 1..18: mol_type = other DNA
taaaaataatttagacct

SEQ ID NO: 201 - DNA, 18 bp, synthetic construct
  source 1..18: mol_type = other DNA
tactgatataattttcaa

SEQ ID NO: 202 - DNA, 18 bp, synthetic construct
  source 1..18: mol_type = other DNA
actgatataattttcaaa

SEQ ID NO: 203 - DNA, 18 bp, synthetic construct
  source 1..18: mol_type = other DNA
ctgatataattttcaaaa

SEQ ID NO: 204 - DNA, 18 bp, synthetic construct
  source 1..18: mol_type = other DNA
tgatataattttcaaaag

SEQ ID NO: 205 - DNA, 18 bp, synthetic construct
  source 1..18: mol_type = other DNA
atataattttcaaaaggg

SEQ ID NO: 206 - DNA, 18 bp, synthetic construct
  source 1..18: mol_type = other DNA
tataattttcaaaaggga

SEQ ID NO: 207 - DNA, 18 bp, synthetic construct
  source 1..18: mol_type = other DNA
ataattttcaaaagggaa

SEQ ID NO: 208 - DNA, 18 bp, synthetic construct
  source 1..18: mol_type = other DNA
taattttcaaaagggaat

SEQ ID NO: 209 - DNA, 18 bp, synthetic construct
  source 1..18: mol_type = other DNA
caaggattaaaggtagca

SEQ ID NO: 210 - RNA, 18 nt, synthetic construct
  source 1..18: mol_type = other RNA
gatgctctccgtctgttt

SEQ ID NO: 211 - RNA, 18 nt, synthetic construct
  source 1..18: mol_type = other RNA
ttcatgatgctctccgtc

SEQ ID NO: 212 - RNA, 18 nt, synthetic construct
  source 1..18: mol_type = other RNA
ttttgttcatgatgctct

SEQ ID NO: 213 - RNA, 18 nt, synthetic construct
  source 1..18: mol_type = other RNA
ttactttttgttcatgat

SEQ ID NO: 214 - RNA, 18 nt, synthetic construct
  source 1..18: mol_type = other RNA
tggtgttactttttgttc

SEQ ID NO: 215 - RNA, 18 nt, synthetic construct
  source 1..18: mol_type = other RNA
acatttggtgttactttt

SEQ ID NO: 216 - RNA, 18 nt, synthetic construct
  source 1..18: mol_type = other RNA
acagaacatttggtgtta

SEQ ID NO: 217 - RNA, 18 nt, synthetic construct
  source 1..18: mol_type = other RNA
atatgacagaacatttgg

SEQ ID NO: 218 - RNA, 18 nt, synthetic construct
  source 1..18: mol_type = other RNA
atctgatatgacagaaca

SEQ ID NO: 219 - RNA, 18 nt, synthetic construct
  source 1..18: mol_type = other RNA
tagaaatctgatatgaca

SEQ ID NO: 220 - RNA, 18 nt, synthetic construct
  source 1..18: mol_type = other RNA
ttagttagaaatctgata

SEQ ID NO: 221 - RNA, 18 nt, synthetic construct
  source 1..18: mol_type = other RNA
tgttattagttagaaatc

SEQ ID NO: 222 - RNA, 18 nt, synthetic construct
  source 1..18: mol_type = other RNA
tagtttgttattagttag

SEQ ID NO: 223 - RNA, 18 nt, synthetic construct
  source 1..18: mol_type = other RNA
atatatagtttgttatta

SEQ ID NO: 224 - RNA, 18 nt, synthetic construct
  source 1..18: mol_type = other RNA
tagaaatatatagtttgt

SEQ ID NO: 225 - RNA, 18 nt, synthetic construct
  source 1..18: mol_type = other RNA
caaaatagaaatatatag

SEQ ID NO: 226 - RNA, 18 nt, synthetic construct
  source 1..18: mol_type = other RNA
atacaaaatagaaatata

SEQ ID NO: 227 - RNA, 18 nt, synthetic construct
  source 1..18: mol_type = other RNA
ctatacaaaatagaaata

SEQ ID NO: 228 - RNA, 18 nt, synthetic construct
  source 1..18: mol_type = other RNA
tcctatacaaaatagaaa

SEQ ID NO: 229 - RNA, 18 nt, synthetic construct
  source 1..18: mol_type = other RNA
tatcctatacaaaataga

SEQ ID NO: 230 - RNA, 18 nt, synthetic construct
  source 1..18: mol_type = other RNA
attatcctatacaaaata

SEQ ID NO: 231 - RNA, 18 nt, synthetic construct
  source 1..18: mol_type = other RNA
agttggagcaagattatc

SEQ ID NO: 232 - RNA, 18 nt, synthetic construct
  source 1..18: mol_type = other RNA
atccaagttggagcaaga

SEQ ID NO: 233 - RNA, 18 nt, synthetic construct
  source 1..18: mol_type = other RNA
accccatccaagttggag

SEQ ID NO: 234 - RNA, 18 nt, synthetic construct
  source 1..18: mol_type = other RNA
gctccaccccatccaagt

SEQ ID NO: 235 - RNA, 18 nt, synthetic construct
  source 1..18: mol_type = other RNA
ccagcgctccaccccatc

SEQ ID NO: 236 - RNA, 18 nt, synthetic construct
  source 1..18: mol_type = other RNA
gaaccagcgctccacccc

SEQ ID NO: 237 - RNA, 18 nt, synthetic construct
  source 1..18: mol_type = other RNA
gggaggaaccagcgctcc

SEQ ID NO: 238 - RNA, 18 nt, synthetic construct
  source 1..18: mol_type = other RNA
ataataaagggctcaggg

SEQ ID NO: 239 - RNA, 18 nt, synthetic construct
  source 1..18: mol_type = other RNA
ccataataaagggctcag

SEQ ID NO: 240 - RNA, 18 nt, synthetic construct
  source 1..18: mol_type = other RNA
gtaatacagtacccataa

SEQ ID NO: 241 - RNA, 18 nt, synthetic construct
  source 1..18: mol_type = other RNA
gggtaatacagtacccat

SEQ ID NO: 242 - RNA, 18 nt, synthetic construct
  source 1..18: mol_type = other RNA
ttaaaggtagcaaaaggg

SEQ ID NO: 243 - RNA, 18 nt, synthetic construct
  source 1..18: mol_type = other RNA
aaggattaaaggtagcaa

SEQ ID NO: 244 - RNA, 18 nt, synthetic construct
  source 1..18: mol_type = other RNA
agtgcaaggattaaaggt

SEQ ID NO: 245 - RNA, 18 nt, synthetic construct
  source 1..18: mol_type = other RNA
gtcacagtgcaaggatta

SEQ ID NO: 246 - RNA, 18 nt, synthetic construct
  source 1..18: mol_type = other RNA
cataagtcacagtgcaag

SEQ ID NO: 247 - RNA, 18 nt, synthetic construct
  source 1..18: mol_type = other RNA
ctacacataagtcacagt

SEQ ID NO: 248 - RNA, 18 nt, synthetic construct
  source 1..18: mol_type = other RNA
ccccactacacataagtc

SEQ ID NO: 249 - RNA, 18 nt, synthetic construct
  source 1..18: mol_type = other RNA
cctcaccccactacacat

SEQ ID NO: 250 - RNA, 18 nt, synthetic construct
  source 1..18: mol_type = other RNA
ccctccctcaccccacta

SEQ ID NO: 251 - RNA, 18 nt, synthetic construct
  source 1..18: mol_type = other RNA
ccaatccctccctcaccc

SEQ ID NO: 252 - RNA, 18 nt, synthetic construct
  source 1..18: mol_type = other RNA
ccttcccaatccctccct

SEQ ID NO: 253 - RNA, 18 nt, synthetic construct
  source 1..18: mol_type = other RNA
agtacccttcccaatccc

SEQ ID NO: 254 - RNA, 18 nt, synthetic construct
  source 1..18: mol_type = other RNA
ataatagtacccttccca

SEQ ID NO: 255 - RNA, 18 nt, synthetic construct
  source 1..18: mol_type = other RNA
gtgcaataatagtaccct

SEQ ID NO: 256 - RNA, 18 nt, synthetic construct
  source 1..18: mol_type = other RNA
ctgtggtgcaataatagt

SEQ ID NO: 257 - RNA, 18 nt, synthetic construct
  source 1..18: mol_type = other RNA
gatgctcactgcctgttt

SEQ ID NO: 258 - RNA, 18 nt, synthetic construct
  source 1..18: mol_type = other RNA
tatatgatgctcactgcc

SEQ ID NO: 259 - RNA, 18 nt, synthetic construct
  source 1..18: mol_type = other RNA
ttttgtatatgatgctca

SEQ ID NO: 260 - RNA, 18 nt, synthetic construct
  source 1..18: mol_type = other RNA
ttactttttgtatatgat

SEQ ID NO: 261 - RNA, 18 nt, synthetic construct
  source 1..18: mol_type = other RNA
tggtgttactttttgtat

SEQ ID NO: 262 - RNA, 18 nt, synthetic construct
  source 1..18: mol_type = other RNA
acatttggtgttactttt

SEQ ID NO: 263 - RNA, 18 nt, synthetic construct
  source 1..18: mol_type = other RNA
acagaacatttggtgtta

SEQ ID NO: 264 - RNA, 18 nt, synthetic construct
  source 1..18: mol_type = other RNA
atatgacagaacatttgg

SEQ ID NO: 265 - RNA, 18 nt, synthetic construct
  source 1..18: mol_type = other RNA
agctgatatgacagaaca

SEQ ID NO: 266 - RNA, 18 nt, synthetic construct
  source 1..18: mol_type = other RNA
tagaaagctgatatgaca

SEQ ID NO: 267 - RNA, 18 nt, synthetic construct
  source 1..18: mol_type = other RNA
ttagttagaaagctgata

SEQ ID NO: 268 - RNA, 18 nt, synthetic construct
  source 1..18: mol_type = other RNA
tattattagttagaaagc

SEQ ID NO: 269 - RNA, 18 nt, synthetic construct
  source 1..18: mol_type = other RNA
tagtttattattagttag

SEQ ID NO: 270 - RNA, 18 nt, synthetic construct
  source 1..18: mol_type = other RNA
atatatagtttattatta

SEQ ID NO: 271 - RNA, 18 nt, synthetic construct
  source 1..18: mol_type = other RNA
tagaaatatatagtttat

SEQ ID NO: 272 - RNA, 18 nt, synthetic construct
  source 1..18: mol_type = other RNA
taaaatagaaatatatag

SEQ ID NO: 273 - RNA, 18 nt, synthetic construct
  source 1..18: mol_type = other RNA
atataaaatagaaatata

SEQ ID NO: 274 - RNA, 18 nt, synthetic construct
  source 1..18: mol_type = other RNA
ctatataaaatagaaata

SEQ ID NO: 275 - RNA, 18 nt, synthetic construct
  source 1..18: mol_type = other RNA
tcctatataaaatagaaa

SEQ ID NO: 276 - RNA, 18 nt, synthetic construct
  source 1..18: mol_type = other RNA
tatcctatataaaataga

SEQ ID NO: 277 - RNA, 18 nt, synthetic construct
  source 1..18: mol_type = other RNA
attatcctatataaaata

SEQ ID NO: 278 - RNA, 18 nt, synthetic construct
  source 1..18: mol_type = other RNA
agttggagcaagattatc

SEQ ID NO: 279 - RNA, 18 nt, synthetic construct
  source 1..18: mol_type = other RNA
atccaagttggagcaaga

SEQ ID NO: 280 - RNA, 18 nt, synthetic construct
  source 1..18: mol_type = other RNA
accccatccaagttggag

SEQ ID NO: 281 - RNA, 18 nt, synthetic construct
  source 1..18: mol_type = other RNA
gctccaccccatccaagt

SEQ ID NO: 282 - RNA, 18 nt, synthetic construct
  source 1..18: mol_type = other RNA
ccaccgctccaccccatc

SEQ ID NO: 283 - RNA, 18 nt, synthetic construct
  source 1..18: mol_type = other RNA
gaaccaccgctccacccc

SEQ ID NO: 284 - RNA, 18 nt, synthetic construct
  source 1..18: mol_type = other RNA
gggaggaaccaccgctcc

SEQ ID NO: 285 - RNA, 18 nt, synthetic construct
  source 1..18: mol_type = other RNA
ataataaagggctgaggg

SEQ ID NO: 286 - RNA, 18 nt, synthetic construct
  source 1..18: mol_type = other RNA
ccataataaagggctgag

SEQ ID NO: 287 - RNA, 18 nt, synthetic construct
  source 1..18: mol_type = other RNA
gtaatacagtacccataa

SEQ ID NO: 288 - RNA, 18 nt, synthetic construct
  source 1..18: mol_type = other RNA
gggtaatacagtacccat

SEQ ID NO: 289 - RNA, 18 nt, synthetic construct
  source 1..18: mol_type = other RNA
ttaaaggtagcaaaaggg

SEQ ID NO: 290 - RNA, 18 nt, synthetic construct
  source 1..18: mol_type = other RNA
aaggattaaaggtagcaa

SEQ ID NO: 291 - RNA, 18 nt, synthetic construct
  source 1..18: mol_type = other RNA
agtgcaaggattaaaggt

SEQ ID NO: 292 - RNA, 18 nt, synthetic construct
  source 1..18: mol_type = other RNA
gtcacagtgcaaggatta

SEQ ID NO: 293 - RNA, 18 nt, synthetic construct
  source 1..18: mol_type = other RNA
cataagtcacagtgcaag

SEQ ID NO: 294 - RNA, 18 nt, synthetic construct
  source 1..18: mol_type = other RNA
ctacacataagtcacagt

SEQ ID NO: 295 - RNA, 18 nt, synthetic construct
  source 1..18: mol_type = other RNA
tcccactacacataagtc

SEQ ID NO: 296 - RNA, 18 nt, synthetic construct
  source 1..18: mol_type = other RNA
ctcaatcccactacacat

SEQ ID NO: 297 - RNA, 18 nt, synthetic construct
  source 1..18: mol_type = other RNA
cctccctcaatcccacta

SEQ ID NO: 298 - RNA, 18 nt, synthetic construct
  source 1..18: mol_type = other RNA
cactccctccctcaatcc

SEQ ID NO: 299 - RNA, 18 nt, synthetic construct
  source 1..18: mol_type = other RNA
cttcccactccctccctc

SEQ ID NO: 300 - RNA, 18 nt, synthetic construct
  source 1..18: mol_type = other RNA
gtacccttcccactccct

SEQ ID NO: 301 - RNA, 18 nt, synthetic construct
  source 1..18: mol_type = other RNA
caattgtacccttcccac

SEQ ID NO: 302 - RNA, 18 nt, synthetic construct
  source 1..18: mol_type = other RNA
tggtgcaattgtaccctt

SEQ ID NO: 303 - RNA, 18 nt, synthetic construct
  source 1..18: mol_type = other RNA
tactgtggtgcaattgta

SEQ ID NO: 304 - DNA, 16 bp, synthetic construct
  source 1..16: mol_type = other DNA
ttggagcaagattatc

SEQ ID NO: 305 - DNA, 17 bp, synthetic construct
  source 1..17: mol_type = other DNA
gttggagcaagattatc

SEQ ID NO: 306 - DNA, 16 bp, synthetic construct
  source 1..16: mol_type = other DNA
gttggagcaagattat

SEQ ID NO: 307 - DNA, 17 bp, synthetic construct
  source 1..17: mol_type = other DNA
agttggagcaagattat

SEQ ID NO: 308 - DNA, 16 bp, synthetic construct
  source 1..16: mol_type = other DNA
agttggagcaagatta

SEQ ID NO: 309 - DNA, 18 bp, synthetic construct
  source 1..18: mol_type = other DNA
gattatcctatacaaaat

SEQ ID NO: 310 - DNA, 18 bp, synthetic construct
  source 1..18: mol_type = other DNA
agattatcctatacaaaa

SEQ ID NO: 311 - DNA, 18 bp, synthetic construct
  source 1..18: mol_type = other DNA
aagattatcctatacaaa

SEQ ID NO: 312 - DNA, 18 bp, synthetic construct
  source 1..18: mol_type = other DNA
caagattatcctatacaa

SEQ ID NO: 313 - DNA, 18 bp, synthetic construct
  source 1..18: mol_type = other DNA
gcaagattatcctataca

SEQ ID NO: 314 - DNA, 18 bp, synthetic construct
  source 1..18: mol_type = other DNA
agcaagattatcctatac

SEQ ID NO: 315 - DNA, 18 bp, synthetic construct
  source 1..18: mol_type = other DNA
gagcaagattatcctata

SEQ ID NO: 316 - DNA, 18 bp, synthetic construct
  source 1..18: mol_type = other DNA
ggagcaagattatcctat

SEQ ID NO: 317 - DNA, 18 bp, synthetic construct
  source 1..18: mol_type = other DNA
tggagcaagattatccta

SEQ ID NO: 318 - DNA, 18 bp, synthetic construct
  source 1..18: mol_type = other DNA
gttggagcaagattatcc

SEQ ID NO: 319 - DNA, 18 bp, synthetic construct
  source 1..18: mol_type = other DNA
ttggagcaagattatcct

SEQ ID NO: 320 - DNA, 18 bp, synthetic construct
  source 1..18: mol_type = other DNA
aagttggagcaagattat

SEQ ID NO: 321 - DNA, 18 bp, synthetic construct
  source 1..18: mol_type = other DNA
caagttggagcaagatta

SEQ ID NO: 322 - DNA, 18 bp, synthetic construct
  source 1..18: mol_type = other DNA
ccaagttggagcaagatt

SEQ ID NO: 323 - DNA, 18 bp, synthetic construct
  source 1..18: mol_type = other DNA
tccaagttggagcaagat

SEQ ID NO: 324 - DNA, 18 bp, synthetic construct
  source 1..18: mol_type = other DNA
agtacccataataaaggg

SEQ ID NO: 325 - DNA, 18 bp, synthetic construct
  source 1..18: mol_type = other DNA
aatacagtacccataata

SEQ ID NO: 326 - DNA, 18 bp, synthetic construct
  source 1..18: mol_type = other DNA
attaaaggtagcaaaagg

SEQ ID NO: 327 - DNA, 18 bp, synthetic construct
  source 1..18: mol_type = other DNA
gattaaaggtagcaaaag

SEQ ID NO: 328 - DNA, 18 bp, synthetic construct
  source 1..18: mol_type = other DNA
ggattaaaggtagcaaaa

SEQ ID NO: 329 - DNA, 18 bp, synthetic construct
  source 1..18: mol_type = other DNA
aggattaaaggtagcaaa

SEQ ID NO: 330 - DNA, 18 bp, synthetic construct
  source 1..18: mol_type = other DNA
caaggattaaaggtagca

SEQ ID NO: 331 - DNA, 18 bp, synthetic construct
  source 1..18: mol_type = other DNA
gcaaggattaaaggtagc

SEQ ID NO: 332 - DNA, 18 bp, synthetic construct
  source 1..18: mol_type = other DNA
tgcaaggattaaaggtag

SEQ ID NO: 333 - DNA, 18 bp, synthetic construct
  source 1..18: mol_type = other DNA
gtgcaaggattaaaggta

SEQ ID NO: 334 - DNA, 18 bp, synthetic construct
  source 1..18: mol_type = other DNA
agtcacagtgcaaggatt

SEQ ID NO: 335 - DNA, 18 bp, synthetic construct
  source 1..18: mol_type = other DNA
aagtcacagtgcaaggat

SEQ ID NO: 336 - DNA, 18 bp, synthetic construct
  source 1..18: mol_type = other DNA
taagtcacagtgcaagga

SEQ ID NO: 337 - DNA, 18 bp, synthetic construct
  source 1..18: mol_type = other DNA
ataagtcacagtgcaagg

SEQ ID NO: 338 - DNA, 18 bp, synthetic construct
  source 1..18: mol_type = other DNA
acataagtcacagtgcaa

SEQ ID NO: 339 - DNA, 18 bp, synthetic construct
  source 1..18: mol_type = other DNA
cacataagtcacagtgca

SEQ ID NO: 340 - DNA, 18 bp, synthetic construct
  source 1..18: mol_type = other DNA
acacataagtcacagtgc

SEQ ID NO: 341 - DNA, 18 bp, synthetic construct
  source 1..18: mol_type = other DNA
tacacataagtcacagtg

SEQ ID NO: 342 - RNA, 16 nt, synthetic construct
  source 1..16: mol_type = other RNA
ttggagcaagattatc

SEQ ID NO: 343 - RNA, 17 nt, synthetic construct
  source 1..17: mol_type = other RNA
gttggagcaagattatc

SEQ ID NO: 344 - RNA, 16 nt, synthetic construct
  source 1..16: mol_type = other RNA
gttggagcaagattat

SEQ ID NO: 345 - RNA, 17 nt, synthetic construct
  source 1..17: mol_type = other RNA
agttggagcaagattat

SEQ ID NO: 346 - RNA, 16 nt, synthetic construct
  source 1..16: mol_type = other RNA
agttggagcaagatta

SEQ ID NO: 347 - RNA, 18 nt, synthetic construct
  source 1..18: mol_type = other RNA
gattatcctatacaaaat

SEQ ID NO: 348 - RNA, 18 nt, synthetic construct
  source 1..18: mol_type = other RNA
agattatcctatacaaaa

SEQ ID NO: 349 - RNA, 18 nt, synthetic construct
  source 1..18: mol_type = other RNA
aagattatcctatacaaa

SEQ ID NO: 350 - RNA, 18 nt, synthetic construct
  source 1..18: mol_type = other RNA
caagattatcctatacaa

SEQ ID NO: 351 - RNA, 18 nt, synthetic construct
  source 1..18: mol_type = other RNA
gcaagattatcctataca

SEQ ID NO: 352 - RNA, 18 nt, synthetic construct
  source 1..18: mol_type = other RNA
agcaagattatcctatac

SEQ ID NO: 353 - RNA, 18 nt, synthetic construct
  source 1..18: mol_type = other RNA
gagcaagattatcctata

SEQ ID NO: 354 - RNA, 18 nt, synthetic construct
  source 1..18: mol_type = other RNA
ggagcaagattatcctat

SEQ ID NO: 355 - RNA, 18 nt, synthetic construct
  source 1..18: mol_type = other RNA
tggagcaagattatccta

SEQ ID NO: 356 - RNA, 18 nt, synthetic construct
  source 1..18: mol_type = other RNA
gttggagcaagattatcc

SEQ ID NO: 357 - RNA, 18 nt, synthetic construct
  source 1..18: mol_type = other RNA
ttggagcaagattatcct

SEQ ID NO: 358 - RNA, 18 nt, synthetic construct
  source 1..18: mol_type = other RNA
aagttggagcaagattat

SEQ ID NO: 359 - RNA, 18 nt, synthetic construct
  source 1..18: mol_type = other RNA
caagttggagcaagatta

SEQ ID NO: 360 - RNA, 18 nt, synthetic construct
  source 1..18: mol_type = other RNA
ccaagttggagcaagatt

SEQ ID NO: 361 - RNA, 18 nt, synthetic construct
  source 1..18: mol_type = other RNA
tccaagttggagcaagat

SEQ ID NO: 362 - RNA, 18 nt, synthetic construct
  source 1..18: mol_type = other RNA
agtacccataataaaggg

SEQ ID NO: 363 - RNA, 18 nt, synthetic construct
  source 1..18: mol_type = other RNA
aatacagtacccataata

SEQ ID NO: 364 - RNA, 18 nt, synthetic construct
  source 1..18: mol_type = other RNA
attaaaggtagcaaaagg

SEQ ID NO: 365 - RNA, 18 nt, synthetic construct
  source 1..18: mol_type = other RNA
gattaaaggtagcaaaag

SEQ ID NO: 366 - RNA, 18 nt, synthetic construct
  source 1..18: mol_type = other RNA
ggattaaaggtagcaaaa

SEQ ID NO: 367 - RNA, 18 nt, synthetic construct
  source 1..18: mol_type = other RNA
aggattaaaggtagcaaa

SEQ ID NO: 368 - RNA, 18 nt, synthetic construct
  source 1..18: mol_type = other RNA
caaggattaaaggtagca

SEQ ID NO: 369 - RNA, 18 nt, synthetic construct
  source 1..18: mol_type = other RNA
gcaaggattaaaggtagc

SEQ ID NO: 370 - RNA, 18 nt, synthetic construct
  source 1..18: mol_type = other RNA
tgcaaggattaaaggtag

SEQ ID NO: 371 - RNA, 18 nt, synthetic construct
  source 1..18: mol_type = other RNA
gtgcaaggattaaaggta

SEQ ID NO: 372 - RNA, 18 nt, synthetic construct
  source 1..18: mol_type = other RNA
agtcacagtgcaaggatt

SEQ ID NO: 373 - RNA, 18 nt, synthetic construct
  source 1..18: mol_type = other RNA
aagtcacagtgcaaggat

SEQ ID NO: 374 - RNA, 18 nt, synthetic construct
  source 1..18: mol_type = other RNA
taagtcacagtgcaagga

SEQ ID NO: 375 - RNA, 18 nt, synthetic construct
  source 1..18: mol_type = other RNA
ataagtcacagtgcaagg

SEQ ID NO: 376 - RNA, 18 nt, synthetic construct
  source 1..18: mol_type = other RNA
acataagtcacagtgcaa

SEQ ID NO: 377 - RNA, 18 nt, synthetic construct
  source 1..18: mol_type = other RNA
cacataagtcacagtgca

SEQ ID NO: 378 - RNA, 18 nt, synthetic construct
  source 1..18: mol_type = other RNA
acacataagtcacagtgc

SEQ ID NO: 379 - RNA, 18 nt, synthetic construct
  source 1..18: mol_type = other RNA
tacacataagtcacagtg

SEQ ID NO: 380 - DNA, 18 bp, synthetic construct
  source 1..18: mol_type = other DNA
atgaatttaataaacttt

SEQ ID NO: 381 - DNA, 18 bp, synthetic construct
  source 1..18: mol_type = other DNA
gaccaatgaatttaataa

SEQ ID NO: 382 - DNA, 18 bp, synthetic construct
  source 1..18: mol_type = other DNA
cacttgaccaatgaattt

SEQ ID NO: 383 - DNA, 18 bp, synthetic construct
  source 1..18: mol_type = other DNA
ctgagcacttgaccaatg

SEQ ID NO: 384 - DNA, 18 bp, synthetic construct
  source 1..18: mol_type = other DNA
aatatctgagcacttgac

SEQ ID NO: 385 - DNA, 18 bp, synthetic construct
  source 1..18: mol_type = other DNA
atggaaatatctgagcac

SEQ ID NO: 386 - DNA, 18 bp, synthetic construct
  source 1..18: mol_type = other DNA
aatgtatggaaatatctg

SEQ ID NO: 387 - DNA, 18 bp, synthetic construct
  source 1..18: mol_type = other DNA
agtgtaatgtatggaaat

SEQ ID NO: 388 - DNA, 18 bp, synthetic construct
  source 1..18: mol_type = other DNA
aatgaagtgtaatgtatg

SEQ ID NO: 389 - DNA, 18 bp, synthetic construct
  source 1..18: mol_type = other DNA
atagaaatgaagtgtaat

SEQ ID NO: 390 - DNA, 18 bp, synthetic construct
  source 1..18: mol_type = other DNA
tttttatagaaatgaagt

SEQ ID NO: 391 - DNA, 18 bp, synthetic construct
  source 1..18: mol_type = other DNA
cagcttttttatagaaat

SEQ ID NO: 392 - DNA, 18 bp, synthetic construct
  source 1..18: mol_type = other DNA
aagatcagcttttttata

SEQ ID NO: 393 - DNA, 18 bp, synthetic construct
  source 1..18: mol_type = other DNA
ccgataagatcagctttt

SEQ ID NO: 394 - DNA, 18 bp, synthetic construct
  source 1..18: mol_type = other DNA
gtataccgataagatcag

SEQ ID NO: 395 - DNA, 18 bp, synthetic construct
  source 1..18: mol_type = other DNA
taaaagtataccgataag

SEQ ID NO: 396 - DNA, 18 bp, synthetic construct
  source 1..18: mol_type = other DNA
aaaattaaaagtataccg

SEQ ID NO: 397 - DNA, 18 bp, synthetic construct
  source 1..18: mol_type = other DNA
ctgagaaaattaaaagta

SEQ ID NO: 398 - DNA, 18 bp, synthetic construct
  source 1..18: mol_type = other DNA
tatttctgagaaaattaa

SEQ ID NO: 399 - DNA, 18 bp, synthetic construct
  source 1..18: mol_type = other DNA
atggttatttctgagaaa

SEQ ID NO: 400 - DNA, 18 bp, synthetic construct
  source 1..18: mol_type = other DNA
tagatatggttatttctg

SEQ ID NO: 401 - DNA, 18 bp, synthetic construct
  source 1..18: mol_type = other DNA
aattatagatatggttat

SEQ ID NO: 402 - DNA, 18 bp, synthetic construct
  source 1..18: mol_type = other DNA
ttaataattatagatatg

SEQ ID NO: 403 - DNA, 18 bp, synthetic construct
  source 1..18: mol_type = other DNA
attgattaataattatag

SEQ ID NO: 404 - DNA, 18 bp, synthetic construct
  source 1..18: mol_type = other DNA
gcattattgattaataat

SEQ ID NO: 405 - DNA, 18 bp, synthetic construct
  source 1..18: mol_type = other DNA
aaaaggcattattgatta

SEQ ID NO: 406 - DNA, 18 bp, synthetic construct
  source 1..18: mol_type = other DNA
aatataaaaggcattatt

SEQ ID NO: 407 - DNA, 18 bp, synthetic construct
  source 1..18: mol_type = other DNA
cttttaatataaaaggca

SEQ ID NO: 408 - DNA, 18 bp, synthetic construct
  source 1..18: mol_type = other DNA
aacctcttttaatataaa

SEQ ID NO: 409 - DNA, 18 bp, synthetic construct
  source 1..18: mol_type = other DNA
aaactaacctcttttaat

SEQ ID NO: 410 - DNA, 18 bp, synthetic construct
  source 1..18: mol_type = other DNA
ttcaaaaactaacctctt

SEQ ID NO: 411 - DNA, 18 bp, synthetic construct
  source 1..18: mol_type = other DNA
caagtttcaaaaactaac

SEQ ID NO: 412 - DNA, 18 bp, synthetic construct
  source 1..18: mol_type = other DNA
aactccaagtttcaaaaa

SEQ ID NO: 413 - DNA, 18 bp, synthetic construct
  source 1..18: mol_type = other DNA
tctaaaactccaagtttc

SEQ ID NO: 414 - DNA, 18 bp, synthetic construct
  source 1..18: mol_type = other DNA
ttatgtctaaaactccaa

SEQ ID NO: 415 - DNA, 18 bp, synthetic construct
  source 1..18: mol_type = other DNA
ggattttatgtctaaaac

SEQ ID NO: 416 - DNA, 18 bp, synthetic construct
  source 1..18: mol_type = other DNA
tataaggattttatgtct

SEQ ID NO: 417 - DNA, 18 bp, synthetic construct
  source 1..18: mol_type = other DNA
gcatttataaggatttta

SEQ ID NO: 418 - DNA, 18 bp, synthetic construct
  source 1..18: mol_type = other DNA
tatcagcatttataagga

SEQ ID NO: 419 - DNA, 18 bp, synthetic construct
  source 1..18: mol_type = other DNA
atcactatcagcatttat

SEQ ID NO: 420 - DNA, 18 bp, synthetic construct
  source 1..18: mol_type = other DNA
gttatatcactatcagca

SEQ ID NO: 421 - DNA, 18 bp, synthetic construct
  source 1..18: mol_type = other DNA
tattagttatatcactat

SEQ ID NO: 422 - DNA, 18 bp, synthetic construct
  source 1..18: mol_type = other DNA
taaactattagttatatc

SEQ ID NO: 423 - DNA, 18 bp, synthetic construct
  source 1..18: mol_type = other DNA
ccatttaaactattagtt

SEQ ID NO: 424 - DNA, 18 bp, synthetic construct
  source 1..18: mol_type = other DNA
tctgaccatttaaactat

SEQ ID NO: 425 - DNA, 18 bp, synthetic construct
  source 1..18: mol_type = other DNA
ataaatctgaccatttaa

SEQ ID NO: 426 - DNA, 18 bp, synthetic construct
  source 1..18: mol_type = other DNA
tattcataaatctgacca

SEQ ID NO: 427 - DNA, 18 bp, synthetic construct
  source 1..18: mol_type = other DNA
agccatattcataaatct

SEQ ID NO: 428 - DNA, 18 bp, synthetic construct
  source 1..18: mol_type = other DNA
aatagagccatattcata

SEQ ID NO: 429 - DNA, 18 bp, synthetic construct
  source 1..18: mol_type = other DNA
tgaggaatagagccatat

SEQ ID NO: 430 - DNA, 18 bp, synthetic construct
  source 1..18: mol_type = other DNA
cattatgaggaatagagc

SEQ ID NO: 431 - DNA, 18 bp, synthetic construct
  source 1..18: mol_type = other DNA
gttgtcattatgaggaat

SEQ ID NO: 432 - DNA, 18 bp, synthetic construct
  source 1..18: mol_type = other DNA
tgtatgttgtcattatga

SEQ ID NO: 433 - DNA, 18 bp, synthetic construct
  source 1..18: mol_type = other DNA
ctgtgtgtatgttgtcat

SEQ ID NO: 434 - DNA, 18 bp, synthetic construct
  source 1..18: mol_type = other DNA
tagtgctgtgtgtatgtt

SEQ ID NO: 435 - DNA, 18 bp, synthetic construct
  source 1..18: mol_type = other DNA
cattttagtgctgtgtgt

SEQ ID NO: 436 - DNA, 18 bp, synthetic construct
  source 1..18: mol_type = other DNA
ttagtcattttagtgctg

SEQ ID NO: 437 - DNA, 18 bp, synthetic construct
  source 1..18: mol_type = other DNA
agagattagtcattttag

SEQ ID NO: 438 - DNA, 18 bp, synthetic construct
  source 1..18: mol_type = other DNA
attgaagagattagtcat

SEQ ID NO: 439 - DNA, 18 bp, synthetic construct
  source 1..18: mol_type = other DNA
cacgtattgaagagatta

SEQ ID NO: 440 - DNA, 18 bp, synthetic construct
  source 1..18: mol_type = other DNA
ccaaacacgtattgaaga

SEQ ID NO: 441 - DNA, 18 bp, synthetic construct
  source 1..18: mol_type = other DNA
caatgccaaacacgtatt

SEQ ID NO: 442 - DNA, 18 bp, synthetic construct
  source 1..18: mol_type = other DNA
ctctacaatgccaaacac

SEQ ID NO: 443 - DNA, 18 bp, synthetic construct
  source 1..18: mol_type = other DNA
tttgactctacaatgcca

SEQ ID NO: 444 - DNA, 18 bp, synthetic construct
  source 1..18: mol_type = other DNA
gttattttgactctacaa

SEQ ID NO: 445 - DNA, 18 bp, synthetic construct
  source 1..18: mol_type = other DNA
ataacgttattttgactc

SEQ ID NO: 446 - DNA, 18 bp, synthetic construct
  source 1..18: mol_type = other DNA
caattataacgttatttt

SEQ ID NO: 447 - DNA, 18 bp, synthetic construct
  source 1..18: mol_type = other DNA
agaatcaattataacgtt

SEQ ID NO: 448 - DNA, 18 bp, synthetic construct
  source 1..18: mol_type = other DNA
aaaatagaatcaattata

SEQ ID NO: 449 - DNA, 18 bp, synthetic construct
  source 1..18: mol_type = other DNA
tataaaaaatagaatcaa

SEQ ID NO: 450 - DNA, 18 bp, synthetic construct
  source 1..18: mol_type = other DNA
agaagtataaaaaataga

SEQ ID NO: 451 - DNA, 18 bp, synthetic construct
  source 1..18: mol_type = other DNA
acactagaagtataaaaa

SEQ ID NO: 452 - DNA, 18 bp, synthetic construct
  source 1..18: mol_type = other DNA
tccaaacactagaagtat

SEQ ID NO: 453 - DNA, 18 bp, synthetic construct
  source 1..18: mol_type = other DNA
aaatatccaaacactaga

SEQ ID NO: 454 - DNA, 18 bp, synthetic construct
  source 1..18: mol_type = other DNA
aaataaaatatccaaaca

SEQ ID NO: 455 - DNA, 18 bp, synthetic construct
  source 1..18: mol_type = other DNA
ttacaaaataaaatatcc

SEQ ID NO: 456 - DNA, 18 bp, synthetic construct
  source 1..18: mol_type = other DNA
tatttttacaaaataaaa

SEQ ID NO: 457 - DNA, 18 bp, synthetic construct
  source 1..18: mol_type = other DNA
gattatatttttacaaaa

SEQ ID NO: 458 - DNA, 18 bp, synthetic construct
  source 1..18: mol_type = other DNA
ttcatgattatattttta

SEQ ID NO: 459 - DNA, 18 bp, synthetic construct
  source 1..18: mol_type = other DNA
catcattcatgattatat

SEQ ID NO: 460 - DNA, 18 bp, synthetic construct
  source 1..18: mol_type = other DNA
ctcaccatcattcatgat

SEQ ID NO: 461 - DNA, 18 bp, synthetic construct
  source 1..18: mol_type = other DNA
ccaacctcaccatcattc

SEQ ID NO: 462 - DNA, 18 bp, synthetic construct
  source 1..18: mol_type = other DNA
tatatccaacctcaccat

SEQ ID NO: 463 - DNA, 18 bp, synthetic construct
  source 1..18: mol_type = other DNA
attcttatatccaacctc

SEQ ID NO: 464 - DNA, 18 bp, synthetic construct
  source 1..18: mol_type = other DNA
tcatcattcttatatcca

SEQ ID NO: 465 - DNA, 18 bp, synthetic construct
  source 1..18: mol_type = other DNA
cataatcatcattcttat

SEQ ID NO: 466 - DNA, 18 bp, synthetic construct
  source 1..18: mol_type = other DNA
ccaatcataatcatcatt

SEQ ID NO: 467 - DNA, 18 bp, synthetic construct
  source 1..18: mol_type = other DNA
acttcccaatcataatca

SEQ ID NO: 468 - DNA, 18 bp, synthetic construct
  source 1..18: mol_type = other DNA
atctcacttcccaatcat

SEQ ID NO: 469 - DNA, 18 bp, synthetic construct
  source 1..18: mol_type = other DNA
ttcaaatctcacttccca

SEQ ID NO: 470 - DNA, 18 bp, synthetic construct
  source 1..18: mol_type = other DNA
gcatgttcaaatctcact

SEQ ID NO: 471 - DNA, 18 bp, synthetic construct
  source 1..18: mol_type = other DNA
tctgagcatgttcaaatc

SEQ ID NO: 472 - DNA, 18 bp, synthetic construct
  source 1..18: mol_type = other DNA
gagtttctgagcatgttc

SEQ ID NO: 473 - DNA, 18 bp, synthetic construct
  source 1..18: mol_type = other DNA
aatgagagtttctgagca

SEQ ID NO: 474 - DNA, 18 bp, synthetic construct
  source 1..18: mol_type = other DNA
aattaaatgagagtttct

SEQ ID NO: 475 - DNA, 18 bp, synthetic construct
  source 1..18: mol_type = other DNA
caaagaattaaatgagag

SEQ ID NO: 476 - DNA, 18 bp, synthetic construct
  source 1..18: mol_type = other DNA
tagggcaaagaattaaat

SEQ ID NO: 477 - DNA, 18 bp, synthetic construct
  source 1..18: mol_type = other DNA
gctgctagggcaaagaat

SEQ ID NO: 478 - DNA, 18 bp, synthetic construct
  source 1..18: mol_type = other DNA
tttatgctgctagggcaa

SEQ ID NO: 479 - DNA, 18 bp, synthetic construct
  source 1..18: mol_type = other DNA
gtgattttatgctgctag

SEQ ID NO: 480 - DNA, 18 bp, synthetic construct
  source 1..18: mol_type = other DNA
ctattgtgattttatgct

SEQ ID NO: 481 - DNA, 18 bp, synthetic construct
  source 1..18: mol_type = other DNA
cgcagctattgtgatttt

SEQ ID NO: 482 - DNA, 18 bp, synthetic construct
  source 1..18: mol_type = other DNA
tttgacgcagctattgtg

SEQ ID NO: 483 - DNA, 18 bp, synthetic construct
  source 1..18: mol_type = other DNA
tacgctttgacgcagcta

SEQ ID NO: 484 - DNA, 18 bp, synthetic construct
  source 1..18: mol_type = other DNA
tgagttacgctttgacgc

SEQ ID NO: 485 - DNA, 18 bp, synthetic construct
  source 1..18: mol_type = other DNA
gtgcctgagttacgcttt

SEQ ID NO: 486 - DNA, 18 bp, synthetic construct
  source 1..18: mol_type = other DNA
aatgagtgcctgagttac

SEQ ID NO: 487 - DNA, 18 bp, synthetic construct
  source 1..18: mol_type = other DNA
aataaaatgagtgcctga

SEQ ID NO: 488 - DNA, 18 bp, synthetic construct
  source 1..18: mol_type = other DNA
acaaaaataaaatgagtg

SEQ ID NO: 489 - DNA, 18 bp, synthetic construct
  source 1..18: mol_type = other DNA
gaacaacaaaaataaaat

SEQ ID NO: 490 - DNA, 18 bp, synthetic construct
  source 1..18: mol_type = other DNA
taacagaacaacaaaaat

SEQ ID NO: 491 - DNA, 18 bp, synthetic construct
  source 1..18: mol_type = other DNA
aaaaataacagaacaaca

SEQ ID NO: 492 - DNA, 18 bp, synthetic construct
  source 1..18: mol_type = other DNA
tttgaaaaaataacagaa

SEQ ID NO: 493 - DNA, 18 bp, synthetic construct
  source 1..18: mol_type = other DNA
catgctttgaaaaaataa

SEQ ID NO: 494 - DNA, 18 bp, synthetic construct
  source 1..18: mol_type = other DNA
aagcacatgctttgaaaa

SEQ ID NO: 495 - DNA, 18 bp, synthetic construct
  source 1..18: mol_type = other DNA
cataaaagcacatgcttt

SEQ ID NO: 496 - DNA, 18 bp, synthetic construct
  source 1..18: mol_type = other DNA
tgttgcataaaagcacat

SEQ ID NO: 497 - DNA, 18 bp, synthetic construct
  source 1..18: mol_type = other DNA
agtaatgttgcataaaag

SEQ ID NO: 498 - DNA, 18 bp, synthetic construct
  source 1..18: mol_type = other DNA
tattcagtaatgttgcat

SEQ ID NO: 499 - DNA, 18 bp, synthetic construct
  source 1..18: mol_type = other DNA
tgctttattcagtaatgt

SEQ ID NO: 500 - DNA, 18 bp, synthetic construct
  source 1..18: mol_type = other DNA
caacatgctttattcagt

SEQ ID NO: 501 - DNA, 18 bp, synthetic construct
  source 1..18: mol_type = other DNA
ctgtacaacatgctttat

SEQ ID NO: 502 - DNA, 18 bp, synthetic construct
  source 1..18: mol_type = other DNA
aagcactgtacaacatgc

SEQ ID NO: 503 - DNA, 18 bp, synthetic construct
  source 1..18: mol_type = other DNA
ttatcaagcactgtacaa

SEQ ID NO: 504 - DNA, 18 bp, synthetic construct
  source 1..18: mol_type = other DNA
acttcttatcaagcactg

SEQ ID NO: 505 - DNA, 18 bp, synthetic construct
  source 1..18: mol_type = other DNA
ttctaacttcttatcaag

SEQ ID NO: 506 - DNA, 18 bp, synthetic construct
  source 1..18: mol_type = other DNA
ttactttctaacttctta

SEQ ID NO: 507 - DNA, 18 bp, synthetic construct
  source 1..18: mol_type = other DNA
atttgttactttctaact

SEQ ID NO: 508 - DNA, 18 bp, synthetic construct
  source 1..18: mol_type = other DNA
aatttatttgttactttc

SEQ ID NO: 509 - DNA, 18 bp, synthetic construct
  source 1..18: mol_type = other DNA
atgataatttatttgtta

SEQ ID NO: 510 - DNA, 18 bp, synthetic construct
  source 1..18: mol_type = other DNA
acgtgatgataatttatt

SEQ ID NO: 511 - DNA, 18 bp, synthetic construct
  source 1..18: mol_type = other DNA
gtgcaacgtgatgataat

SEQ ID NO: 512 - DNA, 18 bp, synthetic construct
  source 1..18: mol_type = other DNA
acaaagtgcaacgtgatg

SEQ ID NO: 513 - DNA, 18 bp, synthetic construct
  source 1..18: mol_type = other DNA
aaaacacaaagtgcaacg

SEQ ID NO: 514 - DNA, 18 bp, synthetic construct
  source 1..18: mol_type = other DNA
catgcaaaacacaaagtg

SEQ ID NO: 515 - DNA, 18 bp, synthetic construct
  source 1..18: mol_type = other DNA
taaaacatgcaaaacaca

SEQ ID NO: 516 - DNA, 18 bp, synthetic construct
  source 1..18: mol_type = other DNA
gtgcataaaacatgcaaa

SEQ ID NO: 517 - DNA, 18 bp, synthetic construct
  source 1..18: mol_type = other DNA
gaaatgtgcataaaacat

SEQ ID NO: 518 - DNA, 18 bp, synthetic construct
  source 1..18: mol_type = other DNA
agccagaaatgtgcataa

SEQ ID NO: 519 - DNA, 18 bp, synthetic construct
  source 1..18: mol_type = other DNA
ctgtcagccagaaatgtg

SEQ ID NO: 520 - DNA, 18 bp, synthetic construct
  source 1..18: mol_type = other DNA
aaaagctgtcagccagaa

SEQ ID NO: 521 - DNA, 18 bp, synthetic construct
  source 1..18: mol_type = other DNA
tgtttaaaagctgtcagc

SEQ ID NO: 522 - DNA, 18 bp, synthetic construct
  source 1..18: mol_type = other DNA
ataaatgtttaaaagctg

SEQ ID NO: 523 - DNA, 18 bp, synthetic construct
  source 1..18: mol_type = other DNA
atacaataaatgtttaaa

SEQ ID NO: 524 - DNA, 18 bp, synthetic construct
  source 1..18: mol_type = other DNA
ttgaaatacaataaatgt

SEQ ID NO: 525 - DNA, 18 bp, synthetic construct
  source 1..18: mol_type = other DNA
gaaatttgaaatacaata

SEQ ID NO: 526 - DNA, 18 bp, synthetic construct
  source 1..18: mol_type = other DNA
gactggaaatttgaaata

SEQ ID NO: 527 - DNA, 18 bp, synthetic construct
  source 1..18: mol_type = other DNA
atttggactggaaatttg

SEQ ID NO: 528 - DNA, 18 bp, synthetic construct
  source 1..18: mol_type = other DNA
gaaaaatttggactggaa

SEQ ID NO: 529 - DNA, 18 bp, synthetic construct
  source 1..18: mol_type = other DNA
aagttgaaaaatttggac

SEQ ID NO: 530 - DNA, 18 bp, synthetic construct
  source 1..18: mol_type = other DNA
tttacaagttgaaaaatt

SEQ ID NO: 531 - DNA, 18 bp, synthetic construct
  source 1..18: mol_type = other DNA
ttaattttacaagttgaa

SEQ ID NO: 532 - DNA, 18 bp, synthetic construct
  source 1..18: mol_type = other DNA
tcagtttaattttacaag

SEQ ID NO: 533 - DNA, 18 bp, synthetic construct
  source 1..18: mol_type = other DNA
ttcactcagtttaatttt

SEQ ID NO: 534 - DNA, 18 bp, synthetic construct
  source 1..18: mol_type = other DNA
atcaattcactcagttta

SEQ ID NO: 535 - DNA, 18 bp, synthetic construct
  source 1..18: mol_type = other DNA
acgacatcaattcactca

SEQ ID NO: 536 - DNA, 18 bp, synthetic construct
  source 1..18: mol_type = other DNA
tattcacgacatcaattc

SEQ ID NO: 537 - DNA, 18 bp, synthetic construct
  source 1..18: mol_type = other DNA
ctagatattcacgacatc

SEQ ID NO: 538 - DNA, 18 bp, synthetic construct
  source 1..18: mol_type = other DNA
ttaccctagatattcacg

SEQ ID NO: 539 - DNA, 18 bp, synthetic construct
  source 1..18: mol_type = other DNA
ttattttaccctagatat

SEQ ID NO: 540 - DNA, 18 bp, synthetic construct
  source 1..18: mol_type = other DNA
aaattttattttacccta

SEQ ID NO: 541 - DNA, 18 bp, synthetic construct
  source 1..18: mol_type = other DNA
aacacaaattttatttta

SEQ ID NO: 542 - DNA, 18 bp, synthetic construct
  source 1..18: mol_type = other DNA
atttaaacacaaatttta

SEQ ID NO: 543 - DNA, 18 bp, synthetic construct
  source 1..18: mol_type = other DNA
tacaaatttaaacacaaa

SEQ ID NO: 544 - DNA, 18 bp, synthetic construct
  source 1..18: mol_type = other DNA
aaaaatacaaatttaaac

SEQ ID NO: 545 - DNA, 18 bp, synthetic construct
  source 1..18: mol_type = other DNA
aaattaaaaatacaaatt

SEQ ID NO: 546 - DNA, 18 bp, synthetic construct
  source 1..18: mol_type = other DNA
ttaggaaattaaaaatac

SEQ ID NO: 547 - DNA, 18 bp, synthetic construct
  source 1..18: mol_type = other DNA
ctaggttaggaaattaaa

SEQ ID NO: 548 - DNA, 18 bp, synthetic construct
  source 1..18: mol_type = other DNA
atttcctaggttaggaaa

SEQ ID NO: 549 - DNA, 18 bp, synthetic construct
  source 1..18: mol_type = other DNA
ttaagatttcctaggtta

SEQ ID NO: 550 - DNA, 18 bp, synthetic construct
  source 1..18: mol_type = other DNA
ggtatttaagatttccta

SEQ ID NO: 551 - DNA, 18 bp, synthetic construct
  source 1..18: mol_type = other DNA
aagaaggtatttaagatt

SEQ ID NO: 552 - DNA, 18 bp, synthetic construct
  source 1..18: mol_type = other DNA
tgaaaaagaaggtattta

SEQ ID NO: 553 - DNA, 18 bp, synthetic construct
  source 1..18: mol_type = other DNA
tcttttgaaaaagaaggt

SEQ ID NO: 554 - DNA, 18 bp, synthetic construct
  source 1..18: mol_type = other DNA
tgagttcttttgaaaaag

SEQ ID NO: 555 - DNA, 18 bp, synthetic construct
  source 1..18: mol_type = other DNA
agacttgagttcttttga

SEQ ID NO: 556 - DNA, 18 bp, synthetic construct
  source 1..18: mol_type = other DNA
cattaagacttgagttct

SEQ ID NO: 557 - DNA, 18 bp, synthetic construct
  source 1..18: mol_type = other DNA
ctatccattaagacttga

SEQ ID NO: 558 - DNA, 18 bp, synthetic construct
  source 1..18: mol_type = other DNA
tttccctatccattaaga

SEQ ID NO: 559 - DNA, 18 bp, synthetic construct
  source 1..18: mol_type = other DNA
gtctgtttccctatccat

SEQ ID NO: 560 - DNA, 18 bp, synthetic construct
  source 1..18: mol_type = other DNA
tttccctactgtggtgca

SEQ ID NO: 561 - DNA, 18 bp, synthetic construct
  source 1..18: mol_type = other DNA
tgtattttccctactgtg

SEQ ID NO: 562 - DNA, 18 bp, synthetic construct
  source 1..18: mol_type = other DNA
aataatgtattttcccta

SEQ ID NO: 563 - DNA, 18 bp, synthetic construct
  source 1..18: mol_type = other DNA
atgtaaataatgtatttt

SEQ ID NO: 564 - DNA, 18 bp, synthetic construct
  source 1..18: mol_type = other DNA
ttaggatgtaaataatgt

SEQ ID NO: 565 - DNA, 18 bp, synthetic construct
  source 1..18: mol_type = other DNA
agggattaggatgtaaat

SEQ ID NO: 566 - DNA, 18 bp, synthetic construct
  source 1..18: mol_type = other DNA
aaagagggaattaggatg

SEQ ID NO: 567 - DNA, 18 bp, synthetic construct
  source 1..18: mol_type = other DNA
attgaaaagaagggatta

SEQ ID NO: 568 - DNA, 18 bp, synthetic construct
  source 1..18: mol_type = other DNA
agacaattgaaaagaggg

SEQ ID NO: 569 - DNA, 18 bp, synthetic construct
  source 1..18: mol_type = other DNA
atttaagacaattgaaaa

SEQ ID NO: 570 - DNA, 18 bp, synthetic construct
  source 1..18: mol_type = other DNA
atgaaatttaagacaatt

SEQ ID NO: 571 - DNA, 18 bp, synthetic construct
  source 1..18: mol_type = other DNA
ttcaaatgaaatttaaga

SEQ ID NO: 572 - DNA, 18 bp, synthetic construct
  source 1..18: mol_type = other DNA
tttttttcaaatgaaatt

SEQ ID NO: 573 - DNA, 18 bp, synthetic construct
  source 1..18: mol_type = other DNA
ttttttttttttcaaatg

SEQ ID NO: 574 - DNA, 18 bp, synthetic construct
  source 1..18: mol_type = other DNA
aaggtttttttttttttc

SEQ ID NO: 575 - DNA, 18 bp, synthetic construct
  source 1..18: mol_type = other DNA
tcataaaggttttttttt

SEQ ID NO: 576 - DNA, 18 bp, synthetic construct
  source 1..18: mol_type = other DNA
taaattcataaaggtttt

SEQ ID NO: 577 - DNA, 18 bp, synthetic construct
  source 1..18: mol_type = other DNA
gagggtaaattcataaag

SEQ ID NO: 578 - DNA, 18 bp, synthetic construct
  source 1..18: mol_type = other DNA
ccacagagggtaaattca

SEQ ID NO: 579 - DNA, 18 bp, synthetic construct
  source 1..18: mol_type = other DNA
aaaatccacagagggtaa

SEQ ID NO: 580 - DNA, 18 bp, synthetic construct
  source 1..18: mol_type = other DNA
gggttaaaatccacagag

SEQ ID NO: 581 - DNA, 18 bp, synthetic construct
  source 1..18: mol_type = other DNA
cattgggattaaaatcca

SEQ ID NO: 582 - DNA, 18 bp, synthetic construct
  source 1..18: mol_type = other DNA
tcaaccattagggttaaa

SEQ ID NO: 583 - DNA, 18 bp, synthetic construct
  source 1..18: mol_type = other DNA
agatatcaaccattggga

SEQ ID NO: 584 - DNA, 18 bp, synthetic construct
  source 1..18: mol_type = other DNA
aataaagatatcaaccat

SEQ ID NO: 585 - DNA, 18 bp, synthetic construct
  source 1..18: mol_type = other DNA
aacttaataaagatatca

SEQ ID NO: 586 - DNA, 18 bp, synthetic construct
  source 1..18: mol_type = other DNA
aatgaaacttaataaaga

SEQ ID NO: 587 - DNA, 18 bp, synthetic construct
  source 1..18: mol_type = other DNA
tattcaatgaaacttaat

SEQ ID NO: 588 - DNA, 18 bp, synthetic construct
  source 1..18: mol_type = other DNA
aatcatattcaatgaaac

SEQ ID NO: 589 - DNA, 18 bp, synthetic construct
  source 1..18: mol_type = other DNA
aactaaatcatattcaat

SEQ ID NO: 590 - DNA, 18 bp, synthetic construct
  source 1..18: mol_type = other DNA
cacataactaaatcatat

SEQ ID NO: 591 - DNA, 18 bp, synthetic construct
  source 1..18: mol_type = other DNA
atatacacataactaaat

SEQ ID NO: 592 - DNA, 18 bp, synthetic construct
  source 1..18: mol_type = other DNA
actccatatacacataac

SEQ ID NO: 593 - DNA, 18 bp, synthetic construct
  source 1..18: mol_type = other DNA
ggataactccatatacac

SEQ ID NO: 594 - DNA, 18 bp, synthetic construct
  source 1..18: mol_type = other DNA
aagatggataactccata

SEQ ID NO: 595 - DNA, 18 bp, synthetic construct
  source 1..18: mol_type = other DNA
ccccaaagatggataact

SEQ ID NO: 596 - DNA, 18 bp, synthetic construct
  source 1..18: mol_type = other DNA
aatctccccaaagatgga

SEQ ID NO: 597 - DNA, 18 bp, synthetic construct
  source 1..18: mol_type = other DNA
ccagtaatctccccaaag

SEQ ID NO: 598 - DNA, 18 bp, synthetic construct
  source 1..18: mol_type = other DNA
ccaatccagtaatctccc

SEQ ID NO: 599 - DNA, 18 bp, synthetic construct
  source 1..18: mol_type = other DNA
cctcaccaatccagtaat

SEQ ID NO: 600 - DNA, 18 bp, synthetic construct
  source 1..18: mol_type = other DNA
cccgccctcaccaatcca

SEQ ID NO: 601 - DNA, 18 bp, synthetic construct
  source 1..18: mol_type = other DNA
ggtcccccgccctcacca

SEQ ID NO: 602 - DNA, 18 bp, synthetic construct
  source 1..18: mol_type = other DNA
accagggtcccccgccct

SEQ ID NO: 603 - DNA, 18 bp, synthetic construct
  source 1..18: mol_type = other DNA
tctacaccagggtccccc

SEQ ID NO: 604 - DNA, 18 bp, synthetic construct
  source 1..18: mol_type = other DNA
atcattctacaccagggt

SEQ ID NO: 605 - DNA, 18 bp, synthetic construct
  source 1..18: mol_type = other DNA
acataatcattctacacc

SEQ ID NO: 606 - DNA, 18 bp, synthetic construct
  source 1..18: mol_type = other DNA
ttttcacataatcattct

SEQ ID NO: 607 - DNA, 18 bp, synthetic construct
  source 1..18: mol_type = other DNA
ttgttttttcacataatc

SEQ ID NO: 608 - DNA, 18 bp, synthetic construct
  source 1..18: mol_type = other DNA
ttaaattgttttttcaca

SEQ ID NO: 609 - DNA, 18 bp, synthetic construct
  source 1..18: mol_type = other DNA
acaagttaaattgttttt

SEQ ID NO: 610 - DNA, 18 bp, synthetic construct
  source 1..18: mol_type = other DNA
gcttaacaagttaaattg

SEQ ID NO: 611 - DNA, 18 bp, synthetic construct
  source 1..18: mol_type = other DNA
catgagcttaacaagtta

SEQ ID NO: 612 - DNA, 18 bp, synthetic construct
  source 1..18: mol_type = other DNA
agtatcatgagcttaaca

SEQ ID NO: 613 - DNA, 18 bp, synthetic construct
  source 1..18: mol_type = other DNA
caaacagtatcatgagct

SEQ ID NO: 614 - DNA, 18 bp, synthetic construct
  source 1..18: mol_type = other DNA
tgcctcaaacagtatcat

SEQ ID NO: 615 - DNA, 18 bp, synthetic construct
  source 1..18: mol_type = other DNA
ctgtatgcctcaaacagt

SEQ ID NO: 616 - DNA, 18 bp, synthetic construct
  source 1..18: mol_type = other DNA
agggactgtatgcctcaa

SEQ ID NO: 617 - DNA, 18 bp, synthetic construct
  source 1..18: mol_type = other DNA
acagcagggactgtatgc

SEQ ID NO: 618 - DNA, 18 bp, synthetic construct
  source 1..18: mol_type = other DNA
actaaacagcaagggctg

SEQ ID NO: 619 - DNA, 18 bp, synthetic construct
  source 1..18: mol_type = other DNA
aatgtactaaacagcagg

SEQ ID NO: 620 - DNA, 18 bp, synthetic construct
  source 1..18: mol_type = other DNA
agaccaatgtactaaaca

SEQ ID NO: 621 - DNA, 18 bp, synthetic construct
  source 1..18: mol_type = other DNA
gacccagaccaatgtact

SEQ ID NO: 622 - DNA, 18 bp, synthetic construct
  source 1..18: mol_type = other DNA
ttcaggacccagaccaat

SEQ ID NO: 623 - DNA, 18 bp, synthetic construct
  source 1..18: mol_type = other DNA
taattttcaggacccaga

SEQ ID NO: 624 - DNA, 18 bp, synthetic construct
  source 1..18: mol_type = other DNA
actggtaattttcaggac

SEQ ID NO: 625 - DNA, 18 bp, synthetic construct
  source 1..18: mol_type = other DNA
atctaactggtaattttc

SEQ ID NO: 626 - DNA, 18 bp, synthetic construct
  source 1..18: mol_type = other DNA
atggtatctaactggtaa

SEQ ID NO: 627 - DNA, 18 bp, synthetic construct
  source 1..18: mol_type = other DNA
aactgatggtatctaact

SEQ ID NO: 628 - DNA, 18 bp, synthetic construct
  source 1..18: mol_type = other DNA
taatcaactgatggtatc

SEQ ID NO: 629 - DNA, 18 bp, synthetic construct
  source 1..18: mol_type = other DNA
atcaataatcaactgatg

SEQ ID NO: 630 - DNA, 18 bp, synthetic construct
  source 1..18: mol_type = other DNA
tacatatcaataatcaac

SEQ ID NO: 631 - DNA, 18 bp, synthetic construct
  source 1..18: mol_type = other DNA
gctcatacatatcaataa

SEQ ID NO: 632 - DNA, 18 bp, synthetic construct
  source 1..18: mol_type = other DNA
tatctgctcatacatatc

SEQ ID NO: 633 - DNA, 18 bp, synthetic construct
  source 1..18: mol_type = other DNA
cctagtatctgctcatac

SEQ ID NO: 634 - DNA, 18 bp, synthetic construct
  source 1..18: mol_type = other DNA
tgcaccctagtatctgct

SEQ ID NO: 635 - DNA, 18 bp, synthetic construct
  source 1..18: mol_type = other DNA
aatattgcaccctagtat

SEQ ID NO: 636 - DNA, 18 bp, synthetic construct
  source 1..18: mol_type = other DNA
cctgaaatattgcaccct

SEQ ID NO: 637 - DNA, 18 bp, synthetic construct
  source 1..18: mol_type = other DNA
tgaaacctgaaatattgc

SEQ ID NO: 638 - DNA, 18 bp, synthetic construct
  source 1..18: mol_type = other DNA
tcttatgaaacctgaaat

SEQ ID NO: 639 - DNA, 18 bp, synthetic construct
  source 1..18: mol_type = other DNA
accagtcttatgaaacct

SEQ ID NO: 640 - DNA, 18 bp, synthetic construct
  source 1..18: mol_type = other DNA
tcaataccagtcttatga

SEQ ID NO: 641 - DNA, 18 bp, synthetic construct
  source 1..18: mol_type = other DNA
cacaatcaataccagtct

SEQ ID NO: 642 - DNA, 18 bp, synthetic construct
  source 1..18: mol_type = other DNA
gtggtcacaatcaatacc

SEQ ID NO: 643 - DNA, 18 bp, synthetic construct
  source 1..18: mol_type = other DNA
tgagagtggtcacaatca

SEQ ID NO: 644 - DNA, 18 bp, synthetic construct
  source 1..18: mol_type = other DNA
aaaaatgagagtggtcac

SEQ ID NO: 645 - DNA, 18 bp, synthetic construct
  source 1..18: mol_type = other DNA
caataaaaaatgagagtg

SEQ ID NO: 646 - DNA, 18 bp, synthetic construct
  source 1..18: mol_type = other DNA
ttacacaataaaaaatga

SEQ ID NO: 647 - DNA, 18 bp, synthetic construct
  source 1..18: mol_type = other DNA
tgaacttacacaataaaa

SEQ ID NO: 648 - DNA, 18 bp, synthetic construct
  source 1..18: mol_type = other DNA
ccatatgaacttacacaa

SEQ ID NO: 649 - DNA, 18 bp, synthetic construct
  source 1..18: mol_type = other DNA
taaccccatatgaactta

SEQ ID NO: 650 - DNA, 18 bp, synthetic construct
  source 1..18: mol_type = other DNA
gaaaataaccccatatga

SEQ ID NO: 651 - DNA, 18 bp, synthetic construct
  source 1..18: mol_type = other DNA
attttgaaaataacccca

SEQ ID NO: 652 - DNA, 18 bp, synthetic construct
  source 1..18: mol_type = other DNA
ttaacattttgaaaataa

SEQ ID NO: 653 - DNA, 18 bp, synthetic construct
  source 1..18: mol_type = other DNA
ccttgttaacattttgaa

SEQ ID NO: 654 - DNA, 18 bp, synthetic construct
  source 1..18: mol_type = other DNA
ttttgccttgttaacatt

SEQ ID NO: 655 - DNA, 18 bp, synthetic construct
  source 1..18: mol_type = other DNA
tatatttttgccttgtta

SEQ ID NO: 656 - DNA, 18 bp, synthetic construct
  source 1..18: mol_type = other DNA
cttaatatatttttgcct

SEQ ID NO: 657 - DNA, 18 bp, synthetic construct
  source 1..18: mol_type = other DNA
tatttcttaatatatttt

SEQ ID NO: 658 - DNA, 18 bp, synthetic construct
  source 1..18: mol_type = other DNA
tcaactatttcttaatat

SEQ ID NO: 659 - DNA, 18 bp, synthetic construct
  source 1..18: mol_type = other DNA
cttattcaactatttctt

SEQ ID NO: 660 - DNA, 18 bp, synthetic construct
  source 1..18: mol_type = other DNA
atgtgcttattcaactat

SEQ ID NO: 661 - DNA, 18 bp, synthetic construct
  source 1..18: mol_type = other DNA
ttcacatgtgcttattca

SEQ ID NO: 662 - DNA, 18 bp, synthetic construct
  source 1..18: mol_type = other DNA
cacaattcacatgtgctt

SEQ ID NO: 663 - DNA, 18 bp, synthetic construct
  source 1..18: mol_type = other DNA
tacaacacaattcacatg

SEQ ID NO: 664 - DNA, 18 bp, synthetic construct
  source 1..18: mol_type = other DNA
ttgtttacaacacaattc

SEQ ID NO: 665 - DNA, 18 bp, synthetic construct
  source 1..18: mol_type = other DNA
actttttgtttacaacac

SEQ ID NO: 666 - DNA, 18 bp, synthetic construct
  source 1..18: mol_type = other DNA
ttctaactttttgtttac

SEQ ID NO: 667 - DNA, 18 bp, synthetic construct
  source 1..18: mol_type = other DNA
ttttattctaactttttg

SEQ ID NO: 668 - DNA, 18 bp, synthetic construct
  source 1..18: mol_type = other DNA
gatttttttattctaact

SEQ ID NO: 669 - DNA, 18 bp, synthetic construct
  source 1..18: mol_type = other DNA
aagtggatttttttattc

SEQ ID NO: 670 - DNA, 18 bp, synthetic construct
  source 1..18: mol_type = other DNA
caaataagtggatttttt

SEQ ID NO: 671 - DNA, 18 bp, synthetic construct
  source 1..18: mol_type = other DNA
taattcaaataagtggat

SEQ ID NO: 672 - DNA, 18 bp, synthetic construct
  source 1..18: mol_type = other DNA
ctgcataattcaaataag

SEQ ID NO: 673 - DNA, 18 bp, synthetic construct
  source 1..18: mol_type = other DNA
ctattctgcataattcaa

SEQ ID NO: 674 - DNA, 18 bp, synthetic construct
  source 1..18: mol_type = other DNA
gtattctattctgcataa

SEQ ID NO: 675 - DNA, 18 bp, synthetic construct
  source 1..18: mol_type = other DNA
ggtatgtattctattctg

SEQ ID NO: 676 - DNA, 18 bp, synthetic construct
  source 1..18: mol_type = other DNA
ttctaggtatgtattcta

SEQ ID NO: 677 - DNA, 18 bp, synthetic construct
  source 1..18: mol_type = other DNA
tttatttctaggtatgta

SEQ ID NO: 678 - DNA, 18 bp, synthetic construct
  source 1..18: mol_type = other DNA
tttgttttatttctaggt

SEQ ID NO: 679 - DNA, 18 bp, synthetic construct
  source 1..18: mol_type = other DNA
acgtttttgttttatttc

SEQ ID NO: 680 - DNA, 18 bp, synthetic construct
  source 1..18: mol_type = other DNA
ataagacgtttttgtttt

SEQ ID NO: 681 - DNA, 18 bp, synthetic construct
  source 1..18: mol_type = other DNA
tcatgataagacgttttt

SEQ ID NO: 682 - DNA, 18 bp, synthetic construct
  source 1..18: mol_type = other DNA
aatactcatgataagacg

SEQ ID NO: 683 - DNA, 18 bp, synthetic construct
  source 1..18: mol_type = other DNA
atcttaatactcatgata

SEQ ID NO: 684 - DNA, 18 bp, synthetic construct
  source 1..18: mol_type = other DNA
attttatcttaatactca

SEQ ID NO: 685 - DNA, 18 bp, synthetic construct
  source 1..18: mol_type = other DNA
cttaaattttatcttaat

SEQ ID NO: 686 - DNA, 18 bp, synthetic construct
  source 1..18: mol_type = other DNA
tatgccttaaattttatc

SEQ ID NO: 687 - DNA, 18 bp, synthetic construct
  source 1..18: mol_type = other DNA
gagtttatgccttaaatt

SEQ ID NO: 688 - DNA, 18 bp, synthetic construct
  source 1..18: mol_type = other DNA
gaagtgagtttatgcctt

SEQ ID NO: 689 - DNA, 18 bp, synthetic construct
  source 1..18: mol_type = other DNA
tctaagaagtgagtttat

SEQ ID NO: 690 - DNA, 18 bp, synthetic construct
  source 1..18: mol_type = other DNA
cttattctaagaagtgag

SEQ ID NO: 691 - DNA, 18 bp, synthetic construct
  source 1..18: mol_type = other DNA
agttacttattctaagaa

SEQ ID NO: 692 - DNA, 18 bp, synthetic construct
  source 1..18: mol_type = other DNA
ttgggagttacttattct

SEQ ID NO: 693 - DNA, 18 bp, synthetic construct
  source 1..18: mol_type = other DNA
gttagttgggagttactt

SEQ ID NO: 694 - DNA, 18 bp, synthetic construct
  source 1..18: mol_type = other DNA
agaaagttagttgggagt

SEQ ID NO: 695 - DNA, 18 bp, synthetic construct
  source 1..18: mol_type = other DNA
atcctagaaagttagttg

SEQ ID NO: 696 - DNA, 18 bp, synthetic construct
  source 1..18: mol_type = other DNA
ttaaaatcctagaaagtt

SEQ ID NO: 697 - DNA, 18 bp, synthetic construct
  source 1..18: mol_type = other DNA
atgttttaaaatcctaga

SEQ ID NO: 698 - DNA, 18 bp, synthetic construct
  source 1..18: mol_type = other DNA
gtgttatgttttaaaatc

SEQ ID NO: 699 - DNA, 18 bp, synthetic construct
  source 1..18: mol_type = other DNA
tcactgtgttatgtttta

SEQ ID NO: 700 - DNA, 18 bp, synthetic construct
  source 1..18: mol_type = other DNA
tgttttcactgtgttatg

SEQ ID NO: 701 - DNA, 18 bp, synthetic construct
  source 1..18: mol_type = other DNA
atgtatgttttcactgtg

SEQ ID NO: 702 - DNA, 18 bp, synthetic construct
  source 1..18: mol_type = other DNA
tgtttatgtatgttttca

SEQ ID NO: 703 - DNA, 18 bp, synthetic construct
  source 1..18: mol_type = other DNA
agttatgtttatgtatgt

SEQ ID NO: 704 - DNA, 18 bp, synthetic construct
  source 1..18: mol_type = other DNA
tgtagagttatgtttatg

SEQ ID NO: 705 - DNA, 18 bp, synthetic construct
  source 1..18: mol_type = other DNA
taaaatgtagagttatgt

SEQ ID NO: 706 - DNA, 18 bp, synthetic construct
  source 1..18: mol_type = other DNA
ataaataaaatgtagagt

SEQ ID NO: 707 - DNA, 18 bp, synthetic construct
  source 1..18: mol_type = other DNA
taagaataaataaaatgt

SEQ ID NO: 708 - DNA, 18 bp, synthetic construct
  source 1..18: mol_type = other DNA
aactttaagaataaataa

SEQ ID NO: 709 - DNA, 18 bp, synthetic construct
  source 1..18: mol_type = other DNA
acttaaactttaagaata

SEQ ID NO: 710 - DNA, 18 bp, synthetic construct
  source 1..18: mol_type = other DNA
aatacacttaaactttaa

SEQ ID NO: 711 - DNA, 18 bp, synthetic construct
  source 1..18: mol_type = other DNA
tgtataatacacttaaac

SEQ ID NO: 712 - DNA, 18 bp, synthetic construct
  source 1..18: mol_type = other DNA
cttcttgtataatacact

SEQ ID NO: 713 - DNA, 18 bp, synthetic construct
  source 1..18: mol_type = other DNA
ctcttcttcttgtataat

SEQ ID NO: 714 - DNA, 18 bp, synthetic construct
  source 1..18: mol_type = other DNA
ataaactcttcttcttgt

SEQ ID NO: 715 - DNA, 18 bp, synthetic construct
  source 1..18: mol_type = other DNA
cgaatataaactcttctt

SEQ ID NO: 716 - DNA, 18 bp, synthetic construct
  source 1..18: mol_type = other DNA
tctctcgaatataaactc

SEQ ID NO: 717 - DNA, 18 bp, synthetic construct
  source 1..18: mol_type = other DNA
ttctgtctctcgaatata

SEQ ID NO: 718 - DNA, 18 bp, synthetic construct
  source 1..18: mol_type = other DNA
actttttctgtctctcga

SEQ ID NO: 719 - DNA, 18 bp, synthetic construct
  source 1..18: mol_type = other DNA
ttctgactttttctgtct

SEQ ID NO: 720 - DNA, 18 bp, synthetic construct
  source 1..18: mol_type = other DNA
aaaaattctgactttttc

SEQ ID NO: 721 - DNA, 18 bp, synthetic construct
  source 1..18: mol_type = other DNA
caaacaaaaattctgact

SEQ ID NO: 722 - DNA, 18 bp, synthetic construct
  source 1..18: mol_type = other DNA
tgatccaaacaaaaattc

SEQ ID NO: 723 - DNA, 18 bp, synthetic construct
  source 1..18: mol_type = other DNA
attggtgatccaaacaaa

SEQ ID NO: 724 - DNA, 18 bp, synthetic construct
  source 1..18: mol_type = other DNA
gatatattggtgatccaa

SEQ ID NO: 725 - DNA, 18 bp, synthetic construct
  source 1..18: mol_type = other DNA
gctatgatatattggtga

SEQ ID NO: 726 - DNA, 18 bp, synthetic construct
  source 1..18: mol_type = other DNA
tgtaagctatgatatatt

SEQ ID NO: 727 - DNA, 18 bp, synthetic construct
  source 1..18: mol_type = other DNA
ttttttgtaagctatgat

SEQ ID NO: 728 - DNA, 18 bp, synthetic construct
  source 1..18: mol_type = other DNA
acagtttttttgtaagct

SEQ ID NO: 729 - DNA, 18 bp, synthetic construct
  source 1..18: mol_type = other DNA
ttaagacagtttttttgt

SEQ ID NO: 730 - DNA, 18 bp, synthetic construct
  source 1..18: mol_type = other DNA
tttaattaagacagtttt

SEQ ID NO: 731 - DNA, 18 bp, synthetic construct
  source 1..18: mol_type = other DNA
tgggttttaattaagaca

SEQ ID NO: 732 - DNA, 18 bp, synthetic construct
  source 1..18: mol_type = other DNA
tgttgtgggttttaatta

SEQ ID NO: 733 - DNA, 18 bp, synthetic construct
  source 1..18: mol_type = other DNA
aattatgttgtgggtttt

SEQ ID NO: 734 - DNA, 18 bp, synthetic construct
  source 1..18: mol_type = other DNA
aaaaaaattatgttgtgg

SEQ ID NO: 735 - DNA, 18 bp, synthetic construct
  source 1..18: mol_type = other DNA
aatctaaaaaaattatgt

SEQ ID NO: 736 - DNA, 18 bp, synthetic construct
  source 1..18: mol_type = other DNA
ttaaaaatctaaaaaaat

SEQ ID NO: 737 - DNA, 18 bp, synthetic construct
  source 1..18: mol_type = other DNA
ctttcttaaaaatctaaa

SEQ ID NO: 738 - DNA, 18 bp, synthetic construct
  source 1..18: mol_type = other DNA
agaatctttcttaaaaat

SEQ ID NO: 739 - DNA, 18 bp, synthetic construct
  source 1..18: mol_type = other DNA
ataatagaatctttctta

SEQ ID NO: 740 - RNA, 18 nt, synthetic construct
  source 1..18: mol_type = other RNA
atgaatttaataaacttt

SEQ ID NO: 741 - RNA, 18 nt, synthetic construct
  source 1..18: mol_type = other RNA
gaccaatgaatttaataa

SEQ ID NO: 742 - RNA, 18 nt, synthetic construct
  source 1..18: mol_type = other RNA
cacttgaccaatgaattt

SEQ ID NO: 743 - RNA, 18 nt, synthetic construct
  source 1..18: mol_type = other RNA
ctgagcacttgaccaatg

SEQ ID NO: 744 - RNA, 18 nt, synthetic construct
  source 1..18: mol_type = other RNA
aatatctgagcacttgac

SEQ ID NO: 745 - RNA, 18 nt, synthetic construct
  source 1..18: mol_type = other RNA
atggaaatatctgagcac

SEQ ID NO: 746 - RNA, 18 nt, synthetic construct
  source 1..18: mol_type = other RNA
aatgtatggaaatatctg

SEQ ID NO: 747 - RNA, 18 nt, synthetic construct
  source 1..18: mol_type = other RNA
agtgtaatgtatggaaat

SEQ ID NO: 748 - RNA, 18 nt, synthetic construct
  source 1..18: mol_type = other RNA
aatgaagtgtaatgtatg

SEQ ID NO: 749 - RNA, 18 nt, synthetic construct
  source 1..18: mol_type = other RNA
atagaaatgaagtgtaat

SEQ ID NO: 750 - RNA, 18 nt, synthetic construct
  source 1..18: mol_type = other RNA
tttttatagaaatgaagt

SEQ ID NO: 751 - RNA, 18 nt, synthetic construct
  source 1..18: mol_type = other RNA
cagcttttttatagaaat

SEQ ID NO: 752 - RNA, 18 nt, synthetic construct
  source 1..18: mol_type = other RNA
aagatcagcttttttata

SEQ ID NO: 753 - RNA, 18 nt, synthetic construct
  source 1..18: mol_type = other RNA
ccgataagatcagctttt

SEQ ID NO: 754 - RNA, 18 nt, synthetic construct
  source 1..18: mol_type = other RNA
gtataccgataagatcag

SEQ ID NO: 755 - RNA, 18 nt, synthetic construct
  source 1..18: mol_type = other RNA
taaaagtataccgataag

SEQ ID NO: 756 - RNA, 18 nt, synthetic construct
  source 1..18: mol_type = other RNA
aaaattaaaagtataccg

SEQ ID NO: 757 - RNA, 18 nt, synthetic construct
  source 1..18: mol_type = other RNA
ctgagaaaattaaaagta

SEQ ID NO: 758 - RNA, 18 nt, synthetic construct
  source 1..18: mol_type = other RNA
tatttctgagaaaattaa

SEQ ID NO: 759 - RNA, 18 nt, synthetic construct
  source 1..18: mol_type = other RNA
atggttatttctgagaaa

SEQ ID NO: 760 - RNA, 18 nt, synthetic construct
  source 1..18: mol_type = other RNA
tagatatggttatttctg

SEQ ID NO: 761 - RNA, 18 nt, synthetic construct
  source 1..18: mol_type = other RNA
aattatagatatggttat

SEQ ID NO: 762 - RNA, 18 nt, synthetic construct
  source 1..18: mol_type = other RNA
ttaataattatagatatg

SEQ ID NO: 763 - RNA, 18 nt, synthetic construct
  source 1..18: mol_type = other RNA
attgattaataattatag

SEQ ID NO: 764 - RNA, 18 nt, synthetic construct
  source 1..18: mol_type = other RNA
gcattattgattaataat

SEQ ID NO: 765 - RNA, 18 nt, synthetic construct
  source 1..18: mol_type = other RNA
aaaaggcattattgatta

SEQ ID NO: 766 - RNA, 18 nt, synthetic construct
  source 1..18: mol_type = other RNA
aatataaaaggcattatt

SEQ ID NO: 767 - RNA, 18 nt, synthetic construct
  source 1..18: mol_type = other RNA
cttttaatataaaaggca

SEQ ID NO: 768 - RNA, 18 nt, synthetic construct
  source 1..18: mol_type = other RNA
aacctcttttaatataaa

SEQ ID NO: 769 - RNA, 18 nt, synthetic construct
  source 1..18: mol_type = other RNA
aaactaacctcttttaat

SEQ ID NO: 770 - RNA, 18 nt, synthetic construct
  source 1..18: mol_type = other RNA
ttcaaaaactaacctctt

SEQ ID NO: 771 - RNA, 18 nt, synthetic construct
  source 1..18: mol_type = other RNA
caagtttcaaaaactaac

SEQ ID NO: 772 - RNA, 18 nt, synthetic construct
  source 1..18: mol_type = other RNA
aactccaagtttcaaaaa

SEQ ID NO: 773 - RNA, 18 nt, synthetic construct
  source 1..18: mol_type = other RNA
tctaaaactccaagtttc

SEQ ID NO: 774 - RNA, 18 nt, synthetic construct
  source 1..18: mol_type = other RNA
ttatgtctaaaactccaa

SEQ ID NO: 775 - RNA, 18 nt, synthetic construct
  source 1..18: mol_type = other RNA
ggattttatgtctaaaac

SEQ ID NO: 776 - RNA, 18 nt, synthetic construct
  source 1..18: mol_type = other RNA
tataaggattttatgtct

SEQ ID NO: 777 - RNA, 18 nt, synthetic construct
  source 1..18: mol_type = other RNA
gcatttataaggatttta

SEQ ID NO: 778 - RNA, 18 nt, synthetic construct
  source 1..18: mol_type = other RNA
tatcagcatttataagga

SEQ ID NO: 779 - RNA, 18 nt, synthetic construct
  source 1..18: mol_type = other RNA
atcactatcagcatttat

SEQ ID NO: 780 - RNA, 18 nt, synthetic construct
  source 1..18: mol_type = other RNA
gttatatcactatcagca

SEQ ID NO: 781 - RNA, 18 nt, synthetic construct
  source 1..18: mol_type = other RNA
tattagttatatcactat

SEQ ID NO: 782 - RNA, 18 nt, synthetic construct
  source 1..18: mol_type = other RNA
taaactattagttatatc

SEQ ID NO: 783 - RNA, 18 nt, synthetic construct
  source 1..18: mol_type = other RNA
ccatttaaactattagtt

SEQ ID NO: 784 - RNA, 18 nt, synthetic construct
  source 1..18: mol_type = other RNA
tctgaccatttaaactat

SEQ ID NO: 785 - RNA, 18 nt, synthetic construct
  source 1..18: mol_type = other RNA
ataaatctgaccatttaa

SEQ ID NO: 786 - RNA, 18 nt, synthetic construct
  source 1..18: mol_type = other RNA
tattcataaatctgacca

SEQ ID NO: 787 - RNA, 18 nt, synthetic construct
  source 1..18: mol_type = other RNA
agccatattcataaatct

SEQ ID NO: 788 - RNA, 18 nt, synthetic construct
  source 1..18: mol_type = other RNA
aatagagccatattcata

SEQ ID NO: 789 - RNA, 18 nt, synthetic construct
  source 1..18: mol_type = other RNA
tgaggaatagagccatat

SEQ ID NO: 790 - RNA, 18 nt, synthetic construct
  source 1..18: mol_type = other RNA
cattatgaggaatagagc

SEQ ID NO: 791 - RNA, 18 nt, synthetic construct
  source 1..18: mol_type = other RNA
gttgtcattatgaggaat

SEQ ID NO: 792 - RNA, 18 nt, synthetic construct
  source 1..18: mol_type = other RNA
tgtatgttgtcattatga

SEQ ID NO: 793 - RNA, 18 nt, synthetic construct
  source 1..18: mol_type = other RNA
ctgtgtgtatgttgtcat

SEQ ID NO: 794 - RNA, 18 nt, synthetic construct
  source 1..18: mol_type = other RNA
tagtgctgtgtgtatgtt

SEQ ID NO: 795 - RNA, 18 nt, synthetic construct
  source 1..18: mol_type = other RNA
cattttagtgctgtgtgt

SEQ ID NO: 796 - RNA, 18 nt, synthetic construct
  source 1..18: mol_type = other RNA
ttagtcattttagtgctg

SEQ ID NO: 797 - RNA, 18 nt, synthetic construct
  source 1..18: mol_type = other RNA
agagattagtcattttag

SEQ ID NO: 798 - RNA, 18 nt, synthetic construct
  source 1..18: mol_type = other RNA
attgaagagattagtcat

SEQ ID NO: 799 - RNA, 18 nt, synthetic construct
  source 1..18: mol_type = other RNA
cacgtattgaagagatta

SEQ ID NO: 800 - RNA, 18 nt, synthetic construct
  source 1..18: mol_type = other RNA
ccaaacacgtattgaaga

SEQ ID NO: 801 - RNA, 18 nt, synthetic construct
  source 1..18: mol_type = other RNA
caatgccaaacacgtatt

SEQ ID NO: 802 - RNA, 18 nt, synthetic construct
  source 1..18: mol_type = other RNA
ctctacaatgccaaacac

SEQ ID NO: 803 - RNA, 18 nt, synthetic construct
  source 1..18: mol_type = other RNA
tttgactctacaatgcca

SEQ ID NO: 804 - RNA, 18 nt, synthetic construct
  source 1..18: mol_type = other RNA
gttattttgactctacaa

SEQ ID NO: 805 - RNA, 18 nt, synthetic construct
  source 1..18: mol_type = other RNA
ataacgttattttgactc

SEQ ID NO: 806 - RNA, 18 nt, synthetic construct
  source 1..18: mol_type = other RNA
caattataacgttatttt

SEQ ID NO: 807 - RNA, 18 nt, synthetic construct
  source 1..18: mol_type = other RNA
agaatcaattataacgtt

SEQ ID NO: 808 - RNA, 18 nt, synthetic construct
  source 1..18: mol_type = other RNA
aaaatagaatcaattata

SEQ ID NO: 809 - RNA, 18 nt, synthetic construct
  source 1..18: mol_type = other RNA
tataaaaaatagaatcaa

SEQ ID NO: 810 - RNA, 18 nt, synthetic construct
  source 1..18: mol_type = other RNA
agaagtataaaaaataga

SEQ ID NO: 811 - RNA, 18 nt, synthetic construct
  source 1..18: mol_type = other RNA
acactagaagtataaaaa

SEQ ID NO: 812 - RNA, 18 nt, synthetic construct
  source 1..18: mol_type = other RNA
tccaaacactagaagtat

SEQ ID NO: 813 - RNA, 18 nt, synthetic construct
  source 1..18: mol_type = other RNA
aaatatccaaacactaga

SEQ ID NO: 814 - RNA, 18 nt, synthetic construct
  source 1..18: mol_type = other RNA
aaataaaatatccaaaca

SEQ ID NO: 815 - RNA, 18 nt, synthetic construct
  source 1..18: mol_type = other RNA
ttacaaaataaaatatcc

SEQ ID NO: 816 - RNA, 18 nt, synthetic construct
  source 1..18: mol_type = other RNA
tatttttacaaaataaaa

SEQ ID NO: 817 - RNA, 18 nt, synthetic construct
  source 1..18: mol_type = other RNA
gattatatttttacaaaa

SEQ ID NO: 818 - RNA, 18 nt, synthetic construct
  source 1..18: mol_type = other RNA
ttcatgattatattttta

SEQ ID NO: 819 - RNA, 18 nt, synthetic construct
  source 1..18: mol_type = other RNA
catcattcatgattatat

SEQ ID NO: 820 - RNA, 18 nt, synthetic construct
  source 1..18: mol_type = other RNA
ctcaccatcattcatgat

SEQ ID NO: 821 - RNA, 18 nt, synthetic construct
  source 1..18: mol_type = other RNA
ccaacctcaccatcattc

SEQ ID NO: 822 - RNA, 18 nt, synthetic construct
  source 1..18: mol_type = other RNA
tatatccaacctcaccat

SEQ ID NO: 823 - RNA, 18 nt, synthetic construct
  source 1..18: mol_type = other RNA
attcttatatccaacctc

SEQ ID NO: 824 - RNA, 18 nt, synthetic construct
  source 1..18: mol_type = other RNA
tcatcattcttatatcca

SEQ ID NO: 825 - RNA, 18 nt, synthetic construct
  source 1..18: mol_type = other RNA
cataatcatcattcttat

SEQ ID NO: 826 - RNA, 18 nt, synthetic construct
  source 1..18: mol_type = other RNA
ccaatcataatcatcatt

SEQ ID NO: 827 - RNA, 18 nt, synthetic construct
  source 1..18: mol_type = other RNA
acttcccaatcataatca

SEQ ID NO: 828 - RNA, 18 nt, synthetic construct
  source 1..18: mol_type = other RNA
atctcacttcccaatcat

SEQ ID NO: 829 - RNA, 18 nt, synthetic construct
  source 1..18: mol_type = other RNA
ttcaaatctcacttccca

SEQ ID NO: 830 - RNA, 18 nt, synthetic construct
  source 1..18: mol_type = other RNA
gcatgttcaaatctcact

SEQ ID NO: 831 - RNA, 18 nt, synthetic construct
  source 1..18: mol_type = other RNA
tctgagcatgttcaaatc

SEQ ID NO: 832 - RNA, 18 nt, synthetic construct
  source 1..18: mol_type = other RNA
gagtttctgagcatgttc

SEQ ID NO: 833 - RNA, 18 nt, synthetic construct
  source 1..18: mol_type = other RNA
aatgagagtttctgagca

SEQ ID NO: 834 - RNA, 18 nt, synthetic construct
  source 1..18: mol_type = other RNA
aattaaatgagagtttct

SEQ ID NO: 835 - RNA, 18 nt, synthetic construct
  source 1..18: mol_type = other RNA
caaagaattaaatgagag

SEQ ID NO: 836 - RNA, 18 nt, synthetic construct
  source 1..18: mol_type = other RNA
tagggcaaagaattaaat

SEQ ID NO: 837 - RNA, 18 nt, synthetic construct
  source 1..18: mol_type = other RNA
gctgctagggcaaagaat

SEQ ID NO: 838 - RNA, 18 nt, synthetic construct
  source 1..18: mol_type = other RNA
tttatgctgctagggcaa

SEQ ID NO: 839 - RNA, 18 nt, synthetic construct
  source 1..18: mol_type = other RNA
gtgattttatgctgctag

SEQ ID NO: 840 - RNA, 18 nt, synthetic construct
  source 1..18: mol_type = other RNA
ctattgtgattttatgct

SEQ ID NO: 841 - RNA, 18 nt, synthetic construct
  source 1..18: mol_type = other RNA
cgcagctattgtgatttt

SEQ ID NO: 842 - RNA, 18 nt, synthetic construct
  source 1..18: mol_type = other RNA
tttgacgcagctattgtg

SEQ ID NO: 843 - RNA, 18 nt, synthetic construct
  source 1..18: mol_type = other RNA
tacgctttgacgcagcta

SEQ ID NO: 844 - RNA, 18 nt, synthetic construct
  source 1..18: mol_type = other RNA
tgagttacgctttgacgc

SEQ ID NO: 845 - RNA, 18 nt, synthetic construct
  source 1..18: mol_type = other RNA
gtgcctgagttacgcttt

SEQ ID NO: 846 - RNA, 18 nt, synthetic construct
  source 1..18: mol_type = other RNA
aatgagtgcctgagttac

SEQ ID NO: 847 - RNA, 18 nt, synthetic construct
  source 1..18: mol_type = other RNA
aataaaatgagtgcctga

SEQ ID NO: 848 - RNA, 18 nt, synthetic construct
  source 1..18: mol_type = other RNA
acaaaaataaaatgagtg

SEQ ID NO: 849 - RNA, 18 nt, synthetic construct
  source 1..18: mol_type = other RNA
gaacaacaaaaataaaat

SEQ ID NO: 850 - RNA, 18 nt, synthetic construct
  source 1..18: mol_type = other RNA
taacagaacaacaaaaat

SEQ ID NO: 851 - RNA, 18 nt, synthetic construct
  source 1..18: mol_type = other RNA
aaaaataacagaacaaca

SEQ ID NO: 852 - RNA, 18 nt, synthetic construct
  source 1..18: mol_type = other RNA
tttgaaaaaataacagaa

SEQ ID NO: 853 - RNA, 18 nt, synthetic construct
  source 1..18: mol_type = other RNA
catgctttgaaaaaataa

SEQ ID NO: 854 - RNA, 18 nt, synthetic construct
  source 1..18: mol_type = other RNA
aagcacatgctttgaaaa

SEQ ID NO: 855 - RNA, 18 nt, synthetic construct
  source 1..18: mol_type = other RNA
cataaaagcacatgcttt

SEQ ID NO: 856 - RNA, 18 nt, synthetic construct
  source 1..18: mol_type = other RNA
tgttgcataaaagcacat

SEQ ID NO: 857 - RNA, 18 nt, synthetic construct
  source 1..18: mol_type = other RNA
agtaatgttgcataaaag

SEQ ID NO: 858 - RNA, 18 nt, synthetic construct
  source 1..18: mol_type = other RNA
tattcagtaatgttgcat

SEQ ID NO: 859 - RNA, 18 nt, synthetic construct
  source 1..18: mol_type = other RNA
tgctttattcagtaatgt

SEQ ID NO: 860 - RNA, 18 nt, synthetic construct
  source 1..18: mol_type = other RNA
caacatgctttattcagt

SEQ ID NO: 861 - RNA, 18 nt, synthetic construct
  source 1..18: mol_type = other RNA
ctgtacaacatgctttat

SEQ ID NO: 862 - RNA, 18 nt, synthetic construct
  source 1..18: mol_type = other RNA
aagcactgtacaacatgc

SEQ ID NO: 863 - RNA, 18 nt, synthetic construct
  source 1..18: mol_type = other RNA
ttatcaagcactgtacaa

SEQ ID NO: 864 - RNA, 18 nt, synthetic construct
  source 1..18: mol_type = other RNA
acttcttatcaagcactg

SEQ ID NO: 865 - RNA, 18 nt, synthetic construct
  source 1..18: mol_type = other RNA
ttctaacttcttatcaag

SEQ ID NO: 866 - RNA, 18 nt, synthetic construct
  source 1..18: mol_type = other RNA
ttactttctaacttctta

SEQ ID NO: 867 - RNA, 18 nt, synthetic construct
  source 1..18: mol_type = other RNA
atttgttactttctaact

SEQ ID NO: 868 - RNA, 18 nt, synthetic construct
  source 1..18: mol_type = other RNA
aatttatttgttactttc

SEQ ID NO: 869 - RNA, 18 nt, synthetic construct
  source 1..18: mol_type = other RNA
atgataatttatttgtta

SEQ ID NO: 870 - RNA, 18 nt, synthetic construct
  source 1..18: mol_type = other RNA
acgtgatgataatttatt

SEQ ID NO: 871 - RNA, 18 nt, synthetic construct
  source 1..18: mol_type = other RNA
gtgcaacgtgatgataat

SEQ ID NO: 872 - RNA, 18 nt, synthetic construct
  source 1..18: mol_type = other RNA
acaaagtgcaacgtgatg

SEQ ID NO: 873 - RNA, 18 nt, synthetic construct
  source 1..18: mol_type = other RNA
aaaacacaaagtgcaacg

SEQ ID NO: 874 - RNA, 18 nt, synthetic construct
  source 1..18: mol_type = other RNA
catgcaaaacacaaagtg

SEQ ID NO: 875 - RNA, 18 nt, synthetic construct
  source 1..18: mol_type = other RNA
taaaacatgcaaaacaca

SEQ ID NO: 876 - RNA, 18 nt, synthetic construct
  source 1..18: mol_type = other RNA
gtgcataaaacatgcaaa

SEQ ID NO: 877 - RNA, 18 nt, synthetic construct
  source 1..18: mol_type = other RNA
gaaatgtgcataaaacat

SEQ ID NO: 878 - RNA, 18 nt, synthetic construct
  source 1..18: mol_type = other RNA
agccagaaatgtgcataa

SEQ ID NO: 879 - RNA, 18 nt, synthetic construct
  source 1..18: mol_type = other RNA
ctgtcagccagaaatgtg

SEQ ID NO: 880 - RNA, 18 nt, synthetic construct
  source 1..18: mol_type = other RNA
aaaagctgtcagccagaa

SEQ ID NO: 881 - RNA, 18 nt, synthetic construct
  source 1..18: mol_type = other RNA
tgtttaaaagctgtcagc

SEQ ID NO: 882 - RNA, 18 nt, synthetic construct
  source 1..18: mol_type = other RNA
ataaatgtttaaaagctg

SEQ ID NO: 883 - RNA, 18 nt, synthetic construct
  source 1..18: mol_type = other RNA
atacaataaatgtttaaa

SEQ ID NO: 884 - RNA, 18 nt, synthetic construct
  source 1..18: mol_type = other RNA
ttgaaatacaataaatgt

SEQ ID NO: 885 - RNA, 18 nt, synthetic construct
  source 1..18: mol_type = other RNA
gaaatttgaaatacaata

SEQ ID NO: 886 - RNA, 18 nt, synthetic construct
  source 1..18: mol_type = other RNA
gactggaaatttgaaata

SEQ ID NO: 887 - RNA, 18 nt, synthetic construct
  source 1..18: mol_type = other RNA
atttggactggaaatttg

SEQ ID NO: 888 - RNA, 18 nt, synthetic construct
  source 1..18: mol_type = other RNA
gaaaaatttggactggaa

SEQ ID NO: 889 - RNA, 18 nt, synthetic construct
  source 1..18: mol_type = other RNA
aagttgaaaaatttggac

SEQ ID NO: 890 - RNA, 18 nt, synthetic construct
  source 1..18: mol_type = other RNA
tttacaagttgaaaaatt

SEQ ID NO: 891 - RNA, 18 nt, synthetic construct
  source 1..18: mol_type = other RNA
ttaattttacaagttgaa

SEQ ID NO: 892 - RNA, 18 nt, synthetic construct
  source 1..18: mol_type = other RNA
tcagtttaattttacaag

SEQ ID NO: 893 - RNA, 18 nt, synthetic construct
  source 1..18: mol_type = other RNA
ttcactcagtttaatttt

SEQ ID NO: 894 - RNA, 18 nt, synthetic construct
  source 1..18: mol_type = other RNA
atcaattcactcagttta

SEQ ID NO: 895 - RNA, 18 nt, synthetic construct
  source 1..18: mol_type = other RNA
acgacatcaattcactca

SEQ ID NO: 896 - RNA, 18 nt, synthetic construct
  source 1..18: mol_type = other RNA
tattcacgacatcaattc

SEQ ID NO: 897 - RNA, 18 nt, synthetic construct
  source 1..18: mol_type = other RNA
ctagatattcacgacatc

SEQ ID NO: 898 - RNA, 18 nt, synthetic construct
  source 1..18: mol_type = other RNA
ttaccctagatattcacg

SEQ ID NO: 899 - RNA, 18 nt, synthetic construct
  source 1..18: mol_type = other RNA
ttattttaccctagatat

SEQ ID NO: 900 - RNA, 18 nt, synthetic construct
  source 1..18: mol_type = other RNA
aaattttattttacccta

SEQ ID NO: 901 - RNA, 18 nt, synthetic construct
  source 1..18: mol_type = other RNA
aacacaaattttatttta

SEQ ID NO: 902 - RNA, 18 nt, synthetic construct
  source 1..18: mol_type = other RNA
atttaaacacaaatttta

SEQ ID NO: 903 - RNA, 18 nt, synthetic construct
  source 1..18: mol_type = other RNA
tacaaatttaaacacaaa

SEQ ID NO: 904 - RNA, 18 nt, synthetic construct
  source 1..18: mol_type = other RNA
aaaaatacaaatttaaac

SEQ ID NO: 905 - RNA, 18 nt, synthetic construct
  source 1..18: mol_type = other RNA
aaattaaaaatacaaatt

SEQ ID NO: 906 - RNA, 18 nt, synthetic construct
  source 1..18: mol_type = other RNA
ttaggaaattaaaaatac

SEQ ID NO: 907 - RNA, 18 nt, synthetic construct
  source 1..18: mol_type = other RNA
ctaggttaggaaattaaa

SEQ ID NO: 908 - RNA, 18 nt, synthetic construct
  source 1..18: mol_type = other RNA
atttcctaggttaggaaa

SEQ ID NO: 909 - RNA, 18 nt, synthetic construct
  source 1..18: mol_type = other RNA
ttaagatttcctaggtta

SEQ ID NO: 910 - RNA, 18 nt, synthetic construct
  source 1..18: mol_type = other RNA
ggtatttaagatttccta

SEQ ID NO: 911 - RNA, 18 nt, synthetic construct
  source 1..18: mol_type = other RNA
aagaaggtatttaagatt

SEQ ID NO: 912 - RNA, 18 nt, synthetic construct
  source 1..18: mol_type = other RNA
tgaaaaagaaggtattta

SEQ ID NO: 913 - RNA, 18 nt, synthetic construct
  source 1..18: mol_type = other RNA
tcttttgaaaaagaaggt

SEQ ID NO: 914 - RNA, 18 nt, synthetic construct
  source 1..18: mol_type = other RNA
tgagttcttttgaaaaag

SEQ ID NO: 915 - RNA, 18 nt, synthetic construct
  source 1..18: mol_type = other RNA
agacttgagttcttttga

SEQ ID NO: 916 - RNA, 18 nt, synthetic construct
  source 1..18: mol_type = other RNA
cattaagacttgagttct

SEQ ID NO: 917 - RNA, 18 nt, synthetic construct
  source 1..18: mol_type = other RNA
ctatccattaagacttga

SEQ ID NO: 918 - RNA, 18 nt, synthetic construct
  source 1..18: mol_type = other RNA
tttccctatccattaaga

SEQ ID NO: 919 - RNA, 18 nt, synthetic construct
  source 1..18: mol_type = other RNA
gtctgtttccctatccat

SEQ ID NO: 920 - RNA, 18 nt, synthetic construct
  source 1..18: mol_type = other RNA
tttccctactgtggtgca

SEQ ID NO: 921 - RNA, 18 nt, synthetic construct
  source 1..18: mol_type = other RNA
tgtattttccctactgtg

SEQ ID NO: 922 - RNA, 18 nt, synthetic construct
  source 1..18: mol_type = other RNA
aataatgtattttcccta

SEQ ID NO: 923 - RNA, 18 nt, synthetic construct
  source 1..18: mol_type = other RNA
atgtaaataatgtatttt

SEQ ID NO: 924 - RNA, 18 nt, synthetic construct
  source 1..18: mol_type = other RNA
ttaggatgtaaataatgt

SEQ ID NO: 925 - RNA, 18 nt, synthetic construct
  source 1..18: mol_type = other RNA
agggattaggatgtaaat

SEQ ID NO: 926 - RNA, 18 nt, synthetic construct
  source 1..18: mol_type = other RNA
aaagagggaattaggatg

SEQ ID NO: 927 - RNA, 18 nt, synthetic construct
  source 1..18: mol_type = other RNA
attgaaaagaagggatta

SEQ ID NO: 928 - RNA, 18 nt, synthetic construct
  source 1..18: mol_type = other RNA
agacaattgaaaagaggg

SEQ ID NO: 929 - RNA, 18 nt, synthetic construct
  source 1..18: mol_type = other RNA
atttaagacaattgaaaa

SEQ ID NO: 930 - RNA, 18 nt, synthetic construct
  source 1..18: mol_type = other RNA
atgaaatttaagacaatt

SEQ ID NO: 931 - RNA, 18 nt, synthetic construct
  source 1..18: mol_type = other RNA
ttcaaatgaaatttaaga

SEQ ID NO: 932 - RNA, 18 nt, synthetic construct
  source 1..18: mol_type = other RNA
tttttttcaaatgaaatt

SEQ ID NO: 933 - RNA, 18 nt, synthetic construct
  source 1..18: mol_type = other RNA
ttttttttttttcaaatg

SEQ ID NO: 934 - RNA, 18 nt, synthetic construct
  source 1..18: mol_type = other RNA
aaggtttttttttttttc

SEQ ID NO: 935 - RNA, 18 nt, synthetic construct
  source 1..18: mol_type = other RNA
tcataaaggttttttttt

SEQ ID NO: 936 - RNA, 18 nt, synthetic construct
  source 1..18: mol_type = other RNA
taaattcataaaggtttt

SEQ ID NO: 937 - RNA, 18 nt, synthetic construct
  source 1..18: mol_type = other RNA
gagggtaaattcataaag

SEQ ID NO: 938 - RNA, 18 nt, synthetic construct
  source 1..18: mol_type = other RNA
ccacagagggtaaattca

SEQ ID NO: 939 - RNA, 18 nt, synthetic construct
  source 1..18: mol_type = other RNA
aaaatccacagagggtaa

SEQ ID NO: 940 - RNA, 18 nt, synthetic construct
  source 1..18: mol_type = other RNA
gggttaaaatccacagag

SEQ ID NO: 941 - RNA, 18 nt, synthetic construct
  source 1..18: mol_type = other RNA
cattgggattaaaatcca

SEQ ID NO: 942 - RNA, 18 nt, synthetic construct
  source 1..18: mol_type = other RNA
tcaaccattagggttaaa

SEQ ID NO: 943 - RNA, 18 nt, synthetic construct
  source 1..18: mol_type = other RNA
agatatcaaccattggga

SEQ ID NO: 944 - RNA, 18 nt, synthetic construct
  source 1..18: mol_type = other RNA
aataaagatatcaaccat

SEQ ID NO: 945 - RNA, 18 nt, synthetic construct
  source 1..18: mol_type = other RNA
aacttaataaagatatca

SEQ ID NO: 946 - RNA, 18 nt, synthetic construct
  source 1..18: mol_type = other RNA
aatgaaacttaataaaga

SEQ ID NO: 947 - RNA, 18 nt, synthetic construct
  source 1..18: mol_type = other RNA
tattcaatgaaacttaat

SEQ ID NO: 948 - RNA, 18 nt, synthetic construct
  source 1..18: mol_type = other RNA
aatcatattcaatgaaac

SEQ ID NO: 949 - RNA, 18 nt, synthetic construct
  source 1..18: mol_type = other RNA
aactaaatcatattcaat

SEQ ID NO: 950 - RNA, 18 nt, synthetic construct
  source 1..18: mol_type = other RNA
cacataactaaatcatat

SEQ ID NO: 951 - RNA, 18 nt, synthetic construct
  source 1..18: mol_type = other RNA
atatacacataactaaat

SEQ ID NO: 952 - RNA, 18 nt, synthetic construct
  source 1..18: mol_type = other RNA
actccatatacacataac

SEQ ID NO: 953 - RNA, 18 nt, synthetic construct
  source 1..18: mol_type = other RNA
ggataactccatatacac

SEQ ID NO: 954 - RNA, 18 nt, synthetic construct
  source 1..18: mol_type = other RNA
aagatggataactccata

SEQ ID NO: 955 - RNA, 18 nt, synthetic construct
  source 1..18: mol_type = other RNA
ccccaaagatggataact

SEQ ID NO: 956 - RNA, 18 nt, synthetic construct
  source 1..18: mol_type = other RNA
aatctccccaaagatgga

SEQ ID NO: 957 - RNA, 18 nt, synthetic construct
  source 1..18: mol_type = other RNA
ccagtaatctccccaaag

SEQ ID NO: 958 - RNA, 18 nt, synthetic construct
  source 1..18: mol_type = other RNA
ccaatccagtaatctccc

SEQ ID NO: 959 - RNA, 18 nt, synthetic construct
  source 1..18: mol_type = other RNA
cctcaccaatccagtaat

SEQ ID NO: 960 - RNA, 18 nt, synthetic construct
  source 1..18: mol_type = other RNA
cccgccctcaccaatcca

SEQ ID NO: 961 - RNA, 18 nt, synthetic construct
  source 1..18: mol_type = other RNA
ggtcccccgccctcacca

SEQ ID NO: 962 - RNA, 18 nt, synthetic construct
  source 1..18: mol_type = other RNA
accagggtcccccgccct

SEQ ID NO: 963 - RNA, 18 nt, synthetic construct
  source 1..18: mol_type = other RNA
tctacaccagggtccccc

SEQ ID NO: 964 - RNA, 18 nt, synthetic construct
  source 1..18: mol_type = other RNA
atcattctacaccagggt

SEQ ID NO: 965 - RNA, 18 nt, synthetic construct
  source 1..18: mol_type = other RNA
acataatcattctacacc

SEQ ID NO: 966 - RNA, 18 nt, synthetic construct
  source 1..18: mol_type = other RNA
ttttcacataatcattct

SEQ ID NO: 967 - RNA, 18 nt, synthetic construct
  source 1..18: mol_type = other RNA
ttgttttttcacataatc

SEQ ID NO: 968 - RNA, 18 nt, synthetic construct
  source 1..18: mol_type = other RNA
ttaaattgttttttcaca

SEQ ID NO: 969 - RNA, 18 nt, synthetic construct
  source 1..18: mol_type = other RNA
acaagttaaattgttttt

SEQ ID NO: 970 - RNA, 18 nt, synthetic construct
  source 1..18: mol_type = other RNA
gcttaacaagttaaattg

SEQ ID NO: 971 - RNA, 18 nt, synthetic construct
  source 1..18: mol_type = other RNA
catgagcttaacaagtta

SEQ ID NO: 972 - RNA, 18 nt, synthetic construct
  source 1..18: mol_type = other RNA
agtatcatgagcttaaca

SEQ ID NO: 973 - RNA, 18 nt, synthetic construct
  source 1..18: mol_type = other RNA
caaacagtatcatgagct

SEQ ID NO: 974 - RNA, 18 nt, synthetic construct
  source 1..18: mol_type = other RNA
tgcctcaaacagtatcat

SEQ ID NO: 975 - RNA, 18 nt, synthetic construct
  source 1..18: mol_type = other RNA
ctgtatgcctcaaacagt

SEQ ID NO: 976 - RNA, 18 nt, synthetic construct
  source 1..18: mol_type = other RNA
agggactgtatgcctcaa

SEQ ID NO: 977 - RNA, 18 nt, synthetic construct
  source 1..18: mol_type = other RNA
acagcagggactgtatgc

SEQ ID NO: 978 - RNA, 18 nt, synthetic construct
  source 1..18: mol_type = other RNA
actaaacagcaagggctg

SEQ ID NO: 979 - RNA, 18 nt, synthetic construct
  source 1..18: mol_type = other RNA
aatgtactaaacagcagg

SEQ ID NO: 980 - RNA, 18 nt, synthetic construct
  source 1..18: mol_type = other RNA
agaccaatgtactaaaca

SEQ ID NO: 981 - RNA, 18 nt, synthetic construct
  source 1..18: mol_type = other RNA
gacccagaccaatgtact

SEQ ID NO: 982 - RNA, 18 nt, synthetic construct
  source 1..18: mol_type = other RNA
ttcaggacccagaccaat

SEQ ID NO: 983 - RNA, 18 nt, synthetic construct
  source 1..18: mol_type = other RNA
taattttcaggacccaga

SEQ ID NO: 984 - RNA, 18 nt, synthetic construct
  source 1..18: mol_type = other RNA
actggtaattttcaggac

SEQ ID NO: 985 - RNA, 18 nt, synthetic construct
  source 1..18: mol_type = other RNA
atctaactggtaattttc

SEQ ID NO: 986 - RNA, 18 nt, synthetic construct
  source 1..18: mol_type = other RNA
atggtatctaactggtaa

SEQ ID NO: 987 - RNA, 18 nt, synthetic construct
  source 1..18: mol_type = other RNA
aactgatggtatctaact

SEQ ID NO: 988 - RNA, 18 nt, synthetic construct
  source 1..18: mol_type = other RNA
taatcaactgatggtatc

SEQ ID NO: 989 - RNA, 18 nt, synthetic construct
  source 1..18: mol_type = other RNA
atcaataatcaactgatg

SEQ ID NO: 990 - RNA, 18 nt, synthetic construct
  source 1..18: mol_type = other RNA
tacatatcaataatcaac

SEQ ID NO: 991 - RNA, 18 nt, synthetic construct
  source 1..18: mol_type = other RNA
gctcatacatatcaataa

SEQ ID NO: 992 - RNA, 18 nt, synthetic construct
  source 1..18: mol_type = other RNA
tatctgctcatacatatc

SEQ ID NO: 993 - RNA, 18 nt, synthetic construct
  source 1..18: mol_type = other RNA
cctagtatctgctcatac

SEQ ID NO: 994 - RNA, 18 nt, synthetic construct
  source 1..18: mol_type = other RNA
tgcaccctagtatctgct

SEQ ID NO: 995 - RNA, 18 nt, synthetic construct
  source 1..18: mol_type = other RNA
aatattgcaccctagtat

SEQ ID NO: 996 - RNA, 18 nt, synthetic construct
  source 1..18: mol_type = other RNA
cctgaaatattgcaccct

SEQ ID NO: 997 - RNA, 18 nt, synthetic construct
  source 1..18: mol_type = other RNA
tgaaacctgaaatattgc

SEQ ID NO: 998 - RNA, 18 nt, synthetic construct
  source 1..18: mol_type = other RNA
tcttatgaaacctgaaat

SEQ ID NO: 999 - RNA, 18 nt, synthetic construct
  source 1..18: mol_type = other RNA
accagtcttatgaaacct

SEQ ID NO: 1000 - RNA, 18 nt, synthetic construct
  source 1..18: mol_type = other RNA
tcaataccagtcttatga

SEQ ID NO: 1001 - RNA, 18 nt, synthetic construct
  source 1..18: mol_type = other RNA
cacaatcaataccagtct

SEQ ID NO: 1002 - RNA, 18 nt, synthetic construct
  source 1..18: mol_type = other RNA
gtggtcacaatcaatacc

SEQ ID NO: 1003 - RNA, 18 nt, synthetic construct
  source 1..18: mol_type = other RNA
tgagagtggtcacaatca

SEQ ID NO: 1004 - RNA, 18 nt, synthetic construct
  source 1..18: mol_type = other RNA
aaaaatgagagtggtcac

SEQ ID NO: 1005 - RNA, 18 nt, synthetic construct
  source 1..18: mol_type = other RNA
caataaaaaatgagagtg

SEQ ID NO: 1006 - RNA, 18 nt, synthetic construct
  source 1..18: mol_type = other RNA
ttacacaataaaaaatga

SEQ ID NO: 1007 - RNA, 18 nt, synthetic construct
  source 1..18: mol_type = other RNA
tgaacttacacaataaaa

SEQ ID NO: 1008 - RNA, 18 nt, synthetic construct
  source 1..18: mol_type = other RNA
ccatatgaacttacacaa

SEQ ID NO: 1009 - RNA, 18 nt, synthetic construct
  source 1..18: mol_type = other RNA
taaccccatatgaactta

SEQ ID NO: 1010 - RNA, 18 nt, synthetic construct
  source 1..18: mol_type = other RNA
gaaaataaccccatatga

SEQ ID NO: 1011 - RNA, 18 nt, synthetic construct
  source 1..18: mol_type = other RNA
attttgaaaataacccca

SEQ ID NO: 1012 - RNA, 18 nt, synthetic construct
  source 1..18: mol_type = other RNA
ttaacattttgaaaataa

SEQ ID NO: 1013 - RNA, 18 nt, synthetic construct
  source 1..18: mol_type = other RNA
ccttgttaacattttgaa

SEQ ID NO: 1014 - RNA, 18 nt, synthetic construct
  source 1..18: mol_type = other RNA
ttttgccttgttaacatt

SEQ ID NO: 1015 - RNA, 18 nt, synthetic construct
  source 1..18: mol_type = other RNA
tatatttttgccttgtta

SEQ ID NO: 1016 - RNA, 18 nt, synthetic construct
  source 1..18: mol_type = other RNA
cttaatatatttttgcct

SEQ ID NO: 1017 - RNA, 18 nt, synthetic construct
  source 1..18: mol_type = other RNA
tatttcttaatatatttt

SEQ ID NO: 1018 - RNA, 18 nt, synthetic construct
  source 1..18: mol_type = other RNA
tcaactatttcttaatat

SEQ ID NO: 1019 - RNA, 18 nt, synthetic construct
  source 1..18: mol_type = other RNA
cttattcaactatttctt

SEQ ID NO: 1020 - RNA, 18 nt, synthetic construct
  source 1..18: mol_type = other RNA
atgtgcttattcaactat

SEQ ID NO: 1021 - RNA, 18 nt, synthetic construct
  source 1..18: mol_type = other RNA
ttcacatgtgcttattca

SEQ ID NO: 1022 - RNA, 18 nt, synthetic construct
  source 1..18: mol_type = other RNA
cacaattcacatgtgctt

SEQ ID NO: 1023 - RNA, 18 nt, synthetic construct
  source 1..18: mol_type = other RNA
tacaacacaattcacatg

SEQ ID NO: 1024 - RNA, 18 nt, synthetic construct
  source 1..18: mol_type = other RNA
ttgtttacaacacaattc

SEQ ID NO: 1025 - RNA, 18 nt, synthetic construct
  source 1..18: mol_type = other RNA
actttttgtttacaacac

SEQ ID NO: 1026 - RNA, 18 nt, synthetic construct
  source 1..18: mol_type = other RNA
ttctaactttttgtttac

SEQ ID NO: 1027 - RNA, 18 nt, synthetic construct
  source 1..18: mol_type = other RNA
ttttattctaactttttg

SEQ ID NO: 1028 - RNA, 18 nt, synthetic construct
  source 1..18: mol_type = other RNA
gatttttttattctaact

SEQ ID NO: 1029 - RNA, 18 nt, synthetic construct
  source 1..18: mol_type = other RNA
aagtggatttttttattc

SEQ ID NO: 1030 - RNA, 18 nt, synthetic construct
  source 1..18: mol_type = other RNA
caaataagtggatttttt

SEQ ID NO: 1031 - RNA, 18 nt, synthetic construct
  source 1..18: mol_type = other RNA
taattcaaataagtggat

SEQ ID NO: 1032 - RNA, 18 nt, synthetic construct
  source 1..18: mol_type = other RNA
ctgcataattcaaataag

SEQ ID NO: 1033 - RNA, 18 nt, synthetic construct
  source 1..18: mol_type = other RNA
ctattctgcataattcaa

SEQ ID NO: 1034 - RNA, 18 nt, synthetic construct
  source 1..18: mol_type = other RNA
gtattctattctgcataa

SEQ ID NO: 1035 - RNA, 18 nt, synthetic construct
  source 1..18: mol_type = other RNA
ggtatgtattctattctg

SEQ ID NO: 1036 - RNA, 18 nt, synthetic construct
  source 1..18: mol_type = other RNA
ttctaggtatgtattcta

SEQ ID NO: 1037 - RNA, 18 nt, synthetic construct
  source 1..18: mol_type = other RNA
tttatttctaggtatgta

SEQ ID NO: 1038 - RNA, 18 nt, synthetic construct
  source 1..18: mol_type = other RNA
tttgttttatttctaggt

SEQ ID NO: 1039 - RNA, 18 nt, synthetic construct
  source 1..18: mol_type = other RNA
acgtttttgttttatttc

SEQ ID NO: 1040 - RNA, 18 nt, synthetic construct
  source 1..18: mol_type = other RNA
ataagacgtttttgtttt

SEQ ID NO: 1041 - RNA, 18 nt, synthetic construct
  source 1..18: mol_type = other RNA
tcatgataagacgttttt

SEQ ID NO: 1042 - RNA, 18 nt, synthetic construct
  source 1..18: mol_type = other RNA
aatactcatgataagacg

SEQ ID NO: 1043 - RNA, 18 nt, synthetic construct
  source 1..18: mol_type = other RNA
atcttaatactcatgata

SEQ ID NO: 1044 - RNA, 18 nt, synthetic construct
  source 1..18: mol_type = other RNA
attttatcttaatactca

SEQ ID NO: 1045 - RNA, 18 nt, synthetic construct
  source 1..18: mol_type = other RNA
cttaaattttatcttaat

SEQ ID NO: 1046 - RNA, 18 nt, synthetic construct
  source 1..18: mol_type = other RNA
tatgccttaaattttatc

SEQ ID NO: 1047 - RNA, 18 nt, synthetic construct
  source 1..18: mol_type = other RNA
gagtttatgccttaaatt

SEQ ID NO: 1048 - RNA, 18 nt, synthetic construct
  source 1..18: mol_type = other RNA
gaagtgagtttatgcctt

SEQ ID NO: 1049 - RNA, 18 nt, synthetic construct
  source 1..18: mol_type = other RNA
tctaagaagtgagtttat

SEQ ID NO: 1050 - RNA, 18 nt, synthetic construct
  source 1..18: mol_type = other RNA
cttattctaagaagtgag

SEQ ID NO: 1051 - RNA, 18 nt, synthetic construct
  source 1..18: mol_type = other RNA
agttacttattctaagaa

SEQ ID NO: 1052 - RNA, 18 nt, synthetic construct
  source 1..18: mol_type = other RNA
ttgggagttacttattct

SEQ ID NO: 1053 - RNA, 18 nt, synthetic construct
  source 1..18: mol_type = other RNA
gttagttgggagttactt

SEQ ID NO: 1054 - RNA, 18 nt, synthetic construct
  source 1..18: mol_type = other RNA
agaaagttagttgggagt

SEQ ID NO: 1055 - RNA, 18 nt, synthetic construct
  source 1..18: mol_type = other RNA
atcctagaaagttagttg

SEQ ID NO: 1056 - RNA, 18 nt, synthetic construct
  source 1..18: mol_type = other RNA
ttaaaatcctagaaagtt

SEQ ID NO: 1057 - RNA, 18 nt, synthetic construct
  source 1..18: mol_type = other RNA
atgttttaaaatcctaga

SEQ ID NO: 1058 - RNA, 18 nt, synthetic construct
  source 1..18: mol_type = other RNA
gtgttatgttttaaaatc

SEQ ID NO: 1059 - RNA, 18 nt, synthetic construct
  source 1..18: mol_type = other RNA
tcactgtgttatgtttta

SEQ ID NO: 1060 - RNA, 18 nt, synthetic construct
  source 1..18: mol_type = other RNA
tgttttcactgtgttatg

SEQ ID NO: 1061 - RNA, 18 nt, synthetic construct
  source 1..18: mol_type = other RNA
atgtatgttttcactgtg

SEQ ID NO: 1062 - RNA, 18 nt, synthetic construct
  source 1..18: mol_type = other RNA
tgtttatgtatgttttca

SEQ ID NO: 1063 - RNA, 18 nt, synthetic construct
  source 1..18: mol_type = other RNA
agttatgtttatgtatgt

SEQ ID NO: 1064 - RNA, 18 nt, synthetic construct
  source 1..18: mol_type = other RNA
tgtagagttatgtttatg

SEQ ID NO: 1065 - RNA, 18 nt, synthetic construct
  source 1..18: mol_type = other RNA
taaaatgtagagttatgt

SEQ ID NO: 1066 - RNA, 18 nt, synthetic construct
  source 1..18: mol_type = other RNA
ataaataaaatgtagagt

SEQ ID NO: 1067 - RNA, 18 nt, synthetic construct
  source 1..18: mol_type = other RNA
taagaataaataaaatgt

SEQ ID NO: 1068 - RNA, 18 nt, synthetic construct
  source 1..18: mol_type = other RNA
aactttaagaataaataa

SEQ ID NO: 1069 - RNA, 18 nt, synthetic construct
  source 1..18: mol_type = other RNA
acttaaactttaagaata

SEQ ID NO: 1070 - RNA, 18 nt, synthetic construct
  source 1..18: mol_type = other RNA
aatacacttaaactttaa

SEQ ID NO: 1071 - RNA, 18 nt, synthetic construct
  source 1..18: mol_type = other RNA
tgtataatacacttaaac

SEQ ID NO: 1072 - RNA, 18 nt, synthetic construct
  source 1..18: mol_type = other RNA
cttcttgtataatacact

SEQ ID NO: 1073 - RNA, 18 nt, synthetic construct
  source 1..18: mol_type = other RNA
ctcttcttcttgtataat

SEQ ID NO: 1074 - RNA, 18 nt, synthetic construct
  source 1..18: mol_type = other RNA
ataaactcttcttcttgt

SEQ ID NO: 1075 - RNA, 18 nt, synthetic construct
  source 1..18: mol_type = other RNA
cgaatataaactcttctt

SEQ ID NO: 1076 - RNA, 18 nt, synthetic construct
  source 1..18: mol_type = other RNA
tctctcgaatataaactc

SEQ ID NO: 1077 - RNA, 18 nt, synthetic construct
  source 1..18: mol_type = other RNA
ttctgtctctcgaatata

SEQ ID NO: 1078 - RNA, 18 nt, synthetic construct
  source 1..18: mol_type = other RNA
actttttctgtctctcga

SEQ ID NO: 1079 - RNA, 18 nt, synthetic construct
  source 1..18: mol_type = other RNA
ttctgactttttctgtct

SEQ ID NO: 1080 - RNA, 18 nt, synthetic construct
  source 1..18: mol_type = other RNA
aaaaattctgactttttc

SEQ ID NO: 1081 - RNA, 18 nt, synthetic construct
  source 1..18: mol_type = other RNA
caaacaaaaattctgact

SEQ ID NO: 1082 - RNA, 18 nt, synthetic construct
  source 1..18: mol_type = other RNA
tgatccaaacaaaaattc

SEQ ID NO: 1083 - RNA, 18 nt, synthetic construct
  source 1..18: mol_type = other RNA
attggtgatccaaacaaa

SEQ ID NO: 1084 - RNA, 18 nt, synthetic construct
  source 1..18: mol_type = other RNA
gatatattggtgatccaa

SEQ ID NO: 1085 - RNA, 18 nt, synthetic construct
  source 1..18: mol_type = other RNA
gctatgatatattggtga

SEQ ID NO: 1086 - RNA, 18 nt, synthetic construct
  source 1..18: mol_type = other RNA
tgtaagctatgatatatt

SEQ ID NO: 1087 - RNA, 18 nt, synthetic construct
  source 1..18: mol_type = other RNA
ttttttgtaagctatgat

SEQ ID NO: 1088 - RNA, 18 nt, synthetic construct
  source 1..18: mol_type = other RNA
acagtttttttgtaagct

SEQ ID NO: 1089 - RNA, 18 nt, synthetic construct
  source 1..18: mol_type = other RNA
ttaagacagtttttttgt

SEQ ID NO: 1090 - RNA, 18 nt, synthetic construct
  source 1..18: mol_type = other RNA
tttaattaagacagtttt

SEQ ID NO: 1091 - RNA, 18 nt, synthetic construct
  source 1..18: mol_type = other RNA
tgggttttaattaagaca

SEQ ID NO: 1092 - RNA, 18 nt, synthetic construct
  source 1..18: mol_type = other RNA
tgttgtgggttttaatta

SEQ ID NO: 1093 - RNA, 18 nt, synthetic construct
  source 1..18: mol_type = other RNA
aattatgttgtgggtttt

SEQ ID NO: 1094 - RNA, 18 nt, synthetic construct
  source 1..18: mol_type = other RNA
aaaaaaattatgttgtgg

SEQ ID NO: 1095 - RNA, 18 nt, synthetic construct
  source 1..18: mol_type = other RNA
aatctaaaaaaattatgt

SEQ ID NO: 1096 - RNA, 18 nt, synthetic construct
  source 1..18: mol_type = other RNA
ttaaaaatctaaaaaaat

SEQ ID NO: 1097 - RNA, 18 nt, synthetic construct
  source 1..18: mol_type = other RNA
ctttcttaaaaatctaaa

SEQ ID NO: 1098 - RNA, 18 nt, synthetic construct
  source 1..18: mol_type = other RNA
agaatctttcttaaaaat

SEQ ID NO: 1099 - RNA, 18 nt, synthetic construct
  source 1..18: mol_type = other RNA
ataatagaatctttctta

SEQ ID NO: 1100 - RNA, 18 nt, synthetic construct
  source 1..18: mol_type = other RNA
  modified_base 1: mod_base = OTHER; note = 2'-O-(2-methoxyethyl) modified nucleotide with phosphorothioate linkage
  modified_base 2: mod_base = OTHER; note = 2'-O-(2-methoxyethyl) modified nucleotide with phosphorothioate linkage
  modified_base 3: mod_base = OTHER; note = 2'-O-(2-methoxyethyl)-5'-methyluridine with phosphorothioate linkage
  modified_base 4: mod_base = OTHER; note = 2'-O-(2-methoxyethyl)-5'-methyluridine with phosphorothioate linkage
  modified_base 5: mod_base = OTHER; note = 2'-O-(2-methoxyethyl) modified nucleotide with phosphorothioate linkage
  modified_base 6: mod_base = OTHER; note = 2'-O-(2-methoxyethyl) modified nucleotide with phosphorothioate linkage
  modified_base 7: mod_base = OTHER; note = 2'-O-(2-methoxyethyl) modified nucleotide with phosphorothioate linkage
  modified_base 8: mod_base = OTHER; note = 2'-O-(2-methoxyethyl) modified nucleotide with phosphorothioate linkage
  modified_base 9: mod_base = OTHER; note = 2'-O-(2-methoxyethyl)-5'-methylcytidine with phosphorothioate linkage
  modified_base 10: mod_base = OTHER; note = 2'-O-(2-methoxyethyl) modified nucleotide with phosphorothioate linkage
  modified_base 11: mod_base = OTHER; note = 2'-O-(2-methoxyethyl) modified nucleotide with phosphorothioate linkage
  modified_base 12: mod_base = OTHER; note = 2'-O-(2-methoxyethyl) modified nucleotide with phosphorothioate linkage
  modified_base 13: mod_base = OTHER; note = 2'-O-(2-methoxyethyl) modified nucleotide with phosphorothioate linkage
  modified_base 14: mod_base = OTHER; note = 2'-O-(2-methoxyethyl)-5'-methyluridine with phosphorothioate linkage
  modified_base 15: mod_base = OTHER; note = 2'-O-(2-methoxyethyl)-5'-methyluridine with phosphorothioate linkage
  modified_base 16: mod_base = OTHER; note = 2'-O-(2-methoxyethyl) modified nucleotide with phosphorothioate linkage
  modified_base 17: mod_base = OTHER; note = 2'-O-(2-methoxyethyl)-5'-methyluridine with phosphorothioate linkage
  modified_base 18: mod_base = OTHER; note = 2'-O-(2-methoxyethyl)-5'-methylcytidine
agttggagcaagattatc

SEQ ID NO: 1101 - DNA, 264 bp, Homo sapiens
  source 1..264: mol_type = genomic DNA
ggaaacagacggagagcatcatgaacaaaaagtaacaccaaatgttctgtcatatcagatttctaactaataacaaactatatatttctattttgtataggataatcttgctccaacttggatggggtggagcgctggttcctcccctgagccctttattatgggtactgtattaccccttttgctacctttaatccttgcactgtgacttatgtgtagtggggtgagggagggattgggaagggtactattattgcaccacag

1-173. (canceled)

174. A method of treating or reducing the likelihood of developing a disease or condition characterized by a reduced expression or function of Na_{V}1.1 protein in a human subject in need thereof, the method comprising administering to the human subject a pharmaceutical composition comprising a compound according to the following chemical structure: [chemical structure]
or a salt thereof, at a first dose, one or more loading doses, and one or more maintenance doses, thereby treating or reducing the likelihood of developing the disease or condition in the human subject;
wherein the administration of the first dose is followed by administration of one or more loading doses,
wherein the one or more maintenance doses is administered after the administration of the one or more loading doses,
wherein the first dose contains the compound at a first dose amount of from about 25 to about 80 mg,
wherein:
(a) a subsequent dose of the one or more maintenance doses is higher than a previously administered maintenance dose,
(b) a subsequent dose of the one or more maintenance doses is the same as a previously administered maintenance dose, or
(c) a subsequent dose of the one or more maintenance doses is lower than a previously administered maintenance dose; and
wherein the disease or condition is Dravet Syndrome.

175. The method of claim 174, wherein the compound has the following structure:

[chemical structure]

176. The method of claim 174, wherein the method comprises administering to the human subject the pharmaceutical composition comprising the compound at the first dose of about 30, 45, or 70 mg.

177. The method of claim 176, wherein the first dose amount is about 30 mg.

178. The method of claim 176, wherein the first dose amount is about 45 mg.

179. The method of claim 176, wherein the first dose amount is about 70 mg.

180. The method of claim 174, wherein each of the one or more loading doses contains the compound at a dose amount that is the same as the first dose amount.

181. The method of claim 174, wherein the method comprises administering the first dose, followed by a single loading dose and the one or more maintenance doses.

182. The method of claim 174, wherein the dose amount of the one or more maintenance doses is about 45 mg.

183. The method of claim 174, wherein the dose amount of the one or more maintenance doses is about 70 mg.

184. The method of claim 174, wherein the dose amount of the one or more maintenance doses is at least about 30% lower than the first dose amount.

185. The method of claim 174, wherein the subsequent dose of the one or more maintenance doses is the same as the previously administered maintenance dose.

186. The method of claim 174, wherein dose frequency of the administration of the pharmaceutical composition is maintained or reduced following an indication that the previous dose is effective.

187. The method of claim 174, wherein dose frequency of the administration of the pharmaceutical composition is reduced following an indication that the previous dose is not tolerated.

188. The method of claim 174, wherein the first dose amount is effective to reduce seizure frequency and/or improve cognition and/or behavior for at least about one year, compared to a human subject not treated with the compound.

189. The method of claim 174, wherein the dose amount of the one or more maintenance doses is effective to reduce seizure frequency and/or improve cognition and/or behavior for at least about one year, compared to observed natural history of the disease.

190. The method of claim 174, wherein the pharmaceutical composition is a liquid composition.

191. The method of claim 174, wherein the compound is dissolved or suspended in a diluent and the first dose has a volume of 5 ml or higher.

192. The method of claim 191, wherein the diluent comprises a cerebral spinal fluid (CSF) sample from the human subject or an artificial cerebral spinal fluid (aCSF) solution.

193. The method of claim 174, wherein the brain concentration of the compound after administration of the pharmaceutical composition is at least 1, 2, 4, 6, 8, or 10 μg/ml.
